(19) United States
(12) Patent Application Publication
(10) Pub. No.: US 2025/0170161 A1
(43) Pub. Date: May 29, 2025

(54) INHIBIN SUBUNIT BETA E INHIBITOR AND METHODS OF USE THEREOF

(71) Applicant: RISEN (SHANGHAI) MEDICINAL TECHNOLOGY CO., LTD., Shanghai (CN)

(72) Inventors: Jiasheng LU, Shanghai (CN); Jun PAN, Shanghai (CN); Xinxin MA, Shanghai (CN); Wen LI, Shanghai (CN); Tianlun ZHOU, Shanghai (CN); Dawei CHEN, Shanghai (CN); Xianqi KONG, Dollard-des-Ormeaux (CA)

(21) Appl. No.: 18/917,300

(22) Filed: Oct. 16, 2024

Related U.S. Application Data
(60) Provisional application No. 63/590,562, filed on Oct. 16, 2023.

(30) Foreign Application Priority Data
Aug. 30, 2024 (WO) PCT/CN2024/115763

(51) Int. Cl. A61K 31/713; C12N 15/113

(52) U.S. Cl. CPC A61K 31/713; C12N 15/113; C12N 2310/11; C12N 2310/14; C12N 2310/333; C12N 2310/334; C12N 2310/335; C12N 2310/336

(57) ABSTRACT

There are provided inhibin subunit beta E (INHBE) inhibitors such as RNAi agents and RNAs useful for inhibiting the expression of INHBE, pharmaceutical compositions thereof, and applications thereof in the prevention and/or treatment of INHBE-associated disorders, e.g., metabolic disorders such as metabolic syndrome. In some embodiments the RNAi agents and RNAs comprise at least one non-canonical base pairing nucleotide.

### CROSS-REFERENCE TO RELATED APPLICATIONS

[0001] This application claims the benefit of priority from U.S. Provisional Application No. 63/590,562 filed Oct. 16, 2023 and from International (PCT) Application No. PCT/CN2024/115763 filed Aug. 30, 2024, each of which is hereby incorporated by reference in its entirety.

### REFERENCE TO AN ELECTRONIC SEQUENCE LISTING

[0002] The content of the electronic sequence listing (40604-135-Sequencelisting-V2.0.xml; Size: 6.09 MB; and Date of Creation: Feb. 8, 2025) is herein incorporated by reference in its entirety.

### FIELD

[0003] The present disclosure relates to an inhibin subunit beta E (INHBE) inhibitor such as an RNAi agent or an RNA, as well as pharmaceutical compositions and methods of use thereof for the prevention, treatment, and/or inhibition of diseases and disorders which are associated with the target INHBE gene.

### BACKGROUND

[0004] Metabolic syndrome is a pathological condition characterized by abdominal obesity, insulin resistance, hypertension, hyperlipidemia and related disorders. Metabolic syndrome can cause metabolic disorders in the body. It is not only a risk factor for cardiovascular disease, diabetes and kidney disease, but it also increases the risk of cancer and all-cause mortality. Metabolic syndrome affects about 20% to 25% of adults worldwide. The incidence of metabolic syndrome associated with obesity is increasing year by year in children and young adults, due to a combination of high-calorie/low-fiber diet and sedentary lifestyle. Current treatments for metabolic syndrome primarily involve diet and lifestyle changes, but patient compliance is generally poor.

[0005] Inhibin subunit beta E gene (INHBE) encodes a secretory protein called activin E. The mRNA of INHBE is mainly expressed in the liver, and it is involved in the regulation of hepatocyte growth and differentiation. It has been reported that insulin stimulates the expression of INHBE in hepatocytes and upregulates INHBE mRNA in the liver of diet-induced obese mice, suggesting that INHBE is involved in glucose metabolism (Hashimoto, O. et al., Life sciences. 2009; 85(13-14):534-40). Further studies showed that activin E was a putative factor for inducing insulin resistance and found that the gene expression of INHBE was positively correlated with insulin resistance and body mass index (BMI) (Sugiyama, M. et al., PLoS One, 2018; 13(3):e0194798). In addition, it has been reported that INHBE is a negative regulator of fat storage in the liver, suggesting that blocking INHBE may be beneficial in the treatment of metabolic diseases related to fat distribution (Akbari, P. et al., Nat Commun, 2022; 13: 4844).

[0006] International PCT Publication No. WO2023003922 discloses RNAi agents, such as double-stranded ribonucleic acid (dsRNA) agents, that target genes associated with metabolic disorders (e.g., inhibin subunit beta E (INHBE), activin A receptor type 1C (ACVR1C), perilipin-1 (PLIN1), phosphodiesterase 3B (PDE3B), inhibin subunit beta C (INHBC) gene). International PCT Publication No. WO2023044094 discloses INHBE modulator compositions and methods of use thereof to inhibit expression and/or activity of INHBE to prevent or treat an INHBE-associated disorder. However, development of RNAi drugs with improved efficacy and/or safety against INHBE targets is needed.

### SUMMARY

[0007] It is an object of the present disclosure to provide an inhibin subunit beta E (INHBE) inhibitor, such as an RNAi agent or an RNA, as well as pharmaceutical compositions and methods of use thereof for the prevention, treatment, and/or inhibition of diseases and disorders such as metabolic syndrome and related diseases.

[0008] The RNAi agents and RNAs of the disclosure have been designed to target the INHBE gene, including portions of the gene that are conserved in orthologs of other mammalian species. RNAi agents typically comprise sense strand and antisense strand which form a duplex, double-stranded RNA (referred to herein as “dsRNA”); RNAi agents comprising dsRNA are also referred to herein as “dsRNAi” agents.

[0009] Without intending to be limited by theory, it is believed that the RNAi agents and RNAs of the disclosure and the specific target sites and/or modifications in these RNAi agents and RNAs confer improved efficacy, stability, potency, durability, and/or safety. For example and without limitation, in some embodiments the RNAi agents and/or RNAs of the disclosure demonstrate: (1) improved efficacy and/or potency, e.g., by hybridizing more strongly to the target gene mRNA (as determined, for example, by an increase in Tm of the antisense strand/target mRNA duplex, e.g., an increase in calculated Tm of the antisense strand); and/or (2) improved safety, e.g., by reducing off-target effects, e.g., by reduced or weaker hybridization with off-target RNAs (as determined, for example, by a decrease in Tm for duplexes formed by the antisense strand and off-target RNAs).

[0010] The use of RNAi agents of the disclosure enables the targeted degradation of mRNAs of the INHBE target gene in mammals. The present inventors have demonstrated that RNAi agents of the disclosure can effect the RNA-induced silencing complex (RISC)-mediated cleavage of INHBE RNA transcripts, resulting in significant inhibition of expression of the INHBE target gene. In certain embodiments, RNAi agents of the disclosure are more effective (e.g., more potent) and/or more specific (e.g., more safe, less off-target effects) than previous RNAi agents targeting the same gene. In certain embodiments, RNAi agents target specific sites in the INHBE mRNA and/or include modifications of the RNA (e.g., non-canonical base pairing nucleotides, modified nucleotides, chemical modifications) selected to increase efficacy, potency, specificity, and/or safety, as described. In some such embodiments, RNAi agents comprise at least one modified nucleotide, including a non-canonical base pairing nucleotide. Methods and compositions comprising these RNAi agents are useful for treating a subject having an INHBE-associated disease or disorder, e.g., a metabolic disorder. Accordingly, there are provided methods for treating, preventing or inhibiting a metabolic disorder in a subject who would benefit from inhibiting or reducing INHBE expression using RNAi agents and compositions of the disclosure.

[0011] In one aspect, the present disclosure provides a double-stranded ribonucleic acid interference (dsRNAi) agent useful for inhibiting expression of inhibin subunit beta E (INHBE) in a cell, wherein the dsRNAi agent comprises a sense strand and an antisense strand forming a double-stranded RNA (dsRNA) region, the antisense strand comprising a region of complementarity to an INHBE mRNA, wherein the region of complementarity comprises at least 15 contiguous nucleotides. In certain embodiments, the dsRNAi agent comprises at least one non-canonical base pairing nucleotide, as described further hereinbelow.

[0012] In some embodiments, the dsRNAi agent comprises one, two, three, four, five or more non-canonical base pairing nucleotides. Non-canonical base pairing nucleotides and additional modified nucleotides may be present in the region of complementarity, in the dsRNA region, or at any other position in the dsRNAi agent. Non-canonical base pairing nucleotides and additional modified nucleotides may be included on the antisense strand, the sense strand, or both. In some embodiments, the dsRNAi agent comprises at least one additional modified nucleotide in addition to the non-canonical base pairing nucleotide(s); such additional modified nucleotide(s) may or may not be on the same oligonucleotide strand as the non-canonical base pairing nucleotide(s).

[0013] In some embodiments, the dsRNAi agent or RNA has increased efficacy, potency, specificity and/or safety, and/or reduced off-target effects, compared to a dsRNAi agent or RNA having the same nucleotide sequence with no non-canonical base pairing and/or modified nucleotide. In some such embodiments, the melting temperature (Tm) of the dsRNAi agent or RNA is changed by at least 2° C. compared to the Tm of the same nucleotide sequence with no non-canonical base pairing and/or modified nucleotide.

[0014] In some embodiments, the dsRNAi agent or RNA of the disclosure comprises a non-canonical base pairing nucleotide and/or modified nucleotide which changes the Tm by at least 2° C., e.g., by 2° C., by over 2° C., by 3° C., by 4° C., by 5° C., or more. In some such embodiments, the Tm is calculated using a formula or algorithm as described herein.

[0015] In some embodiments, the dsRNAi agent or RNA of the disclosure comprises at least one non-canonical base pairing nucleotide and/or modified nucleotide at positions 1-11 of the oligonucleotide strand, e.g., the antisense, according to the direction from the 5′ end to the 3′ end.

[0016] In some embodiments, the dsRNAi agent or RNA of the disclosure comprises at least one non-canonical base pairing nucleotide and/or modified nucleotide at positions 12-21 of the oligonucleotide strand, e.g., the antisense, according to the direction from the 5′ end to the 3′ end. In some embodiments, a guanine in G₀ is replaced with hypoxanthine (I) in the sequence 5′-N₁N₂G₀N₃N₄-3′ (N₁, N₂, N₃, and N₄ are nucleotides independently containing adenine (A), cytosine (C), guanine (G), thymine (T) or uracil (U) as a base, and G₀ is a nucleotide containing guanine as a base), when at least three (3) bases in N₁, N₂, N₃, and N₄ are adenine (A) or uracil (U). In some such embodiments, at least one of N₁, N₂, N₃, N₄ and G₀ has a modified sugar moiety and/or a modified internucleotide linkage.

[0017] In some embodiments, the dsRNAi agent or RNA of the disclosure comprises at least one non-canonical base pairing nucleotide and/or modified nucleotide at position 6, 7 or 8 of the oligonucleotide, according to the direction from the 5′ end to the 3′ end, if at least four (4) of the nucleotides at positions 2-8 are A or U and at least one of the nucleotides at positions 6-8 is G, such that the G at position 6, 7 and/or 8 is replaced with a non-canonical base pairing nucleotide.

[0018] In some such embodiments, the dsRNAi agent or RNA of the disclosure comprises at least 15 contiguous nucleotides differing by no more than 3 nucleotides from any one of the nucleotide sequences shown in Table 1 and Table 2. In some such embodiments, the antisense strand comprises at least 15 contiguous nucleotides differing by no more than 3 nucleotides from any one of the nucleotide sequences shown in Table 1 and Table 2, and the sense strand comprises at least 15 nucleotides complementary to the antisense strand. In some such embodiments, the sense strand comprises at least 15 contiguous nucleotides differing by no more than 3 nucleotides from any one of the nucleotide sequences shown in Table 1 and Table 2, and the antisense strand comprises at least 15 nucleotides complementary to the sense strand. In some such embodiments, the antisense strand and/or the sense stand differs by no more than 1, 2 or 3 nucleotides from any one of the nucleotide sequences shown in Table 1 and Table 2. In some embodiments, the antisense strand and/or the sense strand has any one of the nucleotide sequences shown in Table 1 and Table 2. In some embodiments, the dsRNAi agent comprises a dsRNA comprising any one of the duplex sequences shown in Table 1 and Table 2, e.g., any one of IN-001 to IN-488 and INI-001 to INI-308, or any one of IN-489 to IN-546. In some embodiments, the dsRNAi agent comprises a sense strand comprising 15 contiguous nucleotides as set forth in any one of SEQ ID NOs. 1621 to 1689. In some embodiments, the dsRNAi agent comprises a sense strand which is 19 nucleotides in length and which comprises 15 contiguous nucleotides as set forth in any one of SEQ ID NOs. 1621 to 1689. In some embodiments, the dsRNAi agent comprises an antisense strand comprising 15 contiguous nucleotides as set forth in any one of SEQ ID NOs. 1690 to 1758. In some embodiments, the dsRNAi agent comprises an antisense strand which is 21 nucleotides in length and which comprises 15 contiguous nucleotides as set forth in any one of SEQ ID NOs. 1690 to 1758.

[0019] It should be understood that, in the present disclosure, reference to a dsRNAi agent, RNA, or nucleotide sequence “differing” from another nucleotide sequence can refer to a difference in nucleotide sequence length, a difference in nucleotides, or a combination of the two.

[0020] Examples of non-canonical bases in nucleosides or nucleotides include, without limitation, bases in inosine (I), xanthosine (X), 7-methylguanosine (m7G), N6-methyladenosine (m6A), dihydrouridine, 5-methylcytosine (m5C), pseudouridine (Ψ), and N1-methylpseudouridine (m1Ψ). In certain embodiments, the non-canonical base pairing nucleotide is inosinic acid (I). In certain embodiments, the non-canonical base pairing nucleoside is inosine (I). In some embodiments, at least one guanine (G) in the dsRNAi agent or RNA of the disclosure, e.g., the sense strand and/or the antisense strand, is replaced with hypoxanthine (I). Examples of additional modified nucleosides and nucleotides are described elsewhere herein.

[0021] In another aspect, the present disclosure provides a dsRNAi agent comprising a sense strand and an antisense strand, wherein the antisense strand comprises at least 15 contiguous nucleotides differing by no more than 3 (0, 1, 2 or 3) nucleotides from any one of the nucleotide sequences shown in Table 1 or Table 2, and the sense strand has at least 15, 16, 17, 18, 19, 20 or 21 nucleotides complementary to the antisense strand.

[0022] In some embodiments, the antisense strand comprises at least 15, 16, 17, 18, 19, 20 or 21 nucleotides differing by 0, 1, 2 or 3 nucleotides from any one of the nucleotide sequences shown in Table 1 or Table 2.

[0023] In some embodiments, the sense strand's nucleotide sequence is at least substantially complementary to the antisense strand's nucleotide sequence.

[0024] In some embodiments, the sense strand's nucleotide sequence is completely complementary (i.e., 100% complementary) to the antisense strand's nucleotide sequence.

[0025] In some embodiments, the lengths of the sense strand and the antisense strand are each independently 17-25 nucleotides. In some embodiments, the lengths of the sense strand and the antisense strand are each independently 19-23 nucleotides. In some embodiments, the lengths of the sense strand and the antisense strand are each independently 19-21 nucleotides.

[0026] In some embodiments, the sense strand is 19 nucleotides in length which comprises any one of the following:
[0027] 15 contiguous nucleotides as set forth in SEQ ID NO 1621: GGGUCAAGCACAGCU;
[0028] 15 contiguous nucleotides as set forth in SEQ ID NO 1622: AAGCACAGCUAUCCA;
[0029] 15 contiguous nucleotides as set forth in SEQ ID NO 1623: CAGCUAUCCAUCAGA;
[0030] 15 contiguous nucleotides as set forth in SEQ ID NO 1624: AUCCAUCAGAUGAUC;
[0031] 15 contiguous nucleotides as set forth in SEQ ID NO 1625: UCAGAUGAUCUACUU;
[0032] 15 contiguous nucleotides as set forth in SEQ ID NO 1626: UGAUCUACUUUCAGC;
[0033] 15 contiguous nucleotides as set forth in SEQ ID NO 1627: UGAGUCCCAGACAAU;
[0034] 15 contiguous nucleotides as set forth in SEQ ID NO 1628: AGCCAAGCAGCAAAU;
[0035] 15 contiguous nucleotides as set forth in SEQ ID NO 1629: GUCGUCCCAGAAUAA;
[0036] 15 contiguous nucleotides as set forth in SEQ ID NO 1630: AUCAGCUUUGCUACU;
[0037] 15 contiguous nucleotides as set forth in SEQ ID NO 1631: UGCUACUGUCACAGA;
[0038] 15 contiguous nucleotides as set forth in SEQ ID NO 1632: UUCCUGGCACUCUUU;
[0039] 15 contiguous nucleotides as set forth in SEQ ID NO 1633: UCUUUGCUUGAGGAU;
[0040] 15 contiguous nucleotides as set forth in SEQ ID NO 1634: UGGUGUCCUGAAACU;
[0041] 15 contiguous nucleotides as set forth in SEQ ID NO 1635: CCUGAAACUGCAACU;
[0042] 15 contiguous nucleotides as set forth in SEQ ID NO 1636: AGGCAACAGCACAGU;
[0043] 15 contiguous nucleotides as set forth in SEQ ID NO 1637: CCUAGAGCUUAAGAU;
[0044] 15 contiguous nucleotides as set forth in SEQ ID NO 1638: CUUAAGAUCCGAGCC;
[0045] 15 contiguous nucleotides as set forth in SEQ ID NO 1639: ACCAUUACGUAGACU;
[0046] 15 contiguous nucleotides as set forth in SEQ ID NO 1640: CUCAAAGCCAACAAU;
[0047] 15 contiguous nucleotides as set forth in SEQ ID NO 1641: CUCUACCUGGAUCAU;
[0048] 15 contiguous nucleotides as set forth in SEQ ID NO 1642: GAUCAUAAUGGCAAU;
[0049] 15 contiguous nucleotides as set forth in SEQ ID NO 1643: AAGAGACCAAGAUGA;
[0050] 15 contiguous nucleotides as set forth in SEQ ID NO 1644: CUGGCAAUAUGACUC;
[0051] 15 contiguous nucleotides as set forth in SEQ ID NO 1645: UGGGCACUUUCUUGU;
[0052] 15 contiguous nucleotides as set forth in SEQ ID NO 1646: UUCUUGUCUGAGACU;
[0053] 15 contiguous nucleotides as set forth in SEQ ID NO 1647: UGAGACUCUGGCUUA;
[0054] 15 contiguous nucleotides as set forth in SEQ ID NO 1648: UUGGGAGAUGGGUAA;
[0055] 15 contiguous nucleotides as set forth in SEQ ID NO 1649: GAUGGGUAAAGCGUU;
[0056] 15 contiguous nucleotides as set forth in SEQ ID NO 1650: AAAGCGUUUCUUCUA;
[0057] 15 contiguous nucleotides as set forth in SEQ ID NO 1651: CUUCUAAAGGGGUCU;
[0058] 15 contiguous nucleotides as set forth in SEQ ID NO 1652: UACCCAGAAAGCAUG;
[0059] 15 contiguous nucleotides as set forth in SEQ ID NO 1653: AAGUCCUGUGAGAAG;
[0060] 15 contiguous nucleotides as set forth in SEQ ID NO 1654: GAAGGCAGAGAAAAA;
[0061] 15 contiguous nucleotides as set forth in SEQ ID NO 1655: CAGAGAAAAAUUACU;
[0062] 15 contiguous nucleotides as set forth in SEQ ID NO 1656: UCCCAAGAUGAGAAA;
[0063] 15 contiguous nucleotides as set forth in SEQ ID NO 1657: GAGGAAGCAGAUAGA;
[0064] 15 contiguous nucleotides as set forth in SEQ ID NO 1658: CUGUUGAGGUACCUU;
[0065] 15 contiguous nucleotides as set forth in SEQ ID NO 1659: AGGUACCUUAAGGGA;
[0066] 15 contiguous nucleotides as set forth in SEQ ID NO 1660: CAGGAGUCAGGAAAA;
[0067] 15 contiguous nucleotides as set forth in SEQ ID NO 1661: GGGAGACAAGCAUUU;
[0068] 15 contiguous nucleotides as set forth in SEQ ID NO 1662: ACAAGCAUUUAUACU;
[0069] 15 contiguous nucleotides as set forth in SEQ ID NO 1663: CAUUUAUACUUUCUU;
[0070] 15 contiguous nucleotides as set forth in SEQ ID NO 1664: AAAGAAAAUCAACAA;
[0071] 15 contiguous nucleotides as set forth in SEQ ID NO 1665: CAAAUGUGAGUCAUA;
[0072] 15 contiguous nucleotides as set forth in SEQ ID NO 1666: GUCAUAAAGAAGGGU;
[0073] 15 contiguous nucleotides as set forth in SEQ ID NO 1667: AGAGCAACAGUUCUU;
[0074] 15 contiguous nucleotides as set forth in SEQ ID NO 1668: GGGUGUCCACAAAGU;
[0075] 15 contiguous nucleotides as set forth in SEQ ID NO 1669: UCCACAAAGUCAAAG;
[0076] 15 contiguous nucleotides as set forth in SEQ ID NO 1670: AAAGUCAAAGCUAUU;
[0077] 15 contiguous nucleotides as set forth in SEQ ID NO 1671: AAAGCUAUUUUCAUA;
[0078] 15 contiguous nucleotides as set forth in SEQ ID NO 1672: AUUUUCAUAAUAAUA;
[0079] 15 contiguous nucleotides as set forth in SEQ ID NO 1673: AUAAUACUAACAUGU;
[0080] 15 contiguous nucleotides as set forth in SEQ ID NO 1674: ACUAACAUGUUAUUU;
[0081] 15 contiguous nucleotides as set forth in SEQ ID NO 1675: AUGUUAUUUGCCUUU;
[0082] 15 contiguous nucleotides as set forth in SEQ ID NO 1676: AUUUGCCUUUUGAAU;
[0083] 15 contiguous nucleotides as set forth in SEQ ID NO 1677: UUUUGAAUUCUCAUU;
[0084] 15 contiguous nucleotides as set forth in SEQ ID NO 1678: UUCUCAUUAUCUUAA;
[0085] 15 contiguous nucleotides as set forth in SEQ ID NO 1679: UUAUCUUAAAAUUGU;
[0086] 15 contiguous nucleotides as set forth in SEQ ID NO 1680: GUGUGACAUGUGAUU;
[0087] 15 contiguous nucleotides as set forth in SEQ ID NO 1681: AUGUGAUUACAUCAU;
[0088] 15 contiguous nucleotides as set forth in SEQ ID NO 1682: UUACAUCAUCUUUCU;
[0089] 15 contiguous nucleotides as set forth in SEQ ID NO 1683: AUCUUUCUGACAUCA;
[0090] 15 contiguous nucleotides as set forth in SEQ ID NO 1684: UCUGACAUCAUUGUU;
[0091] 15 contiguous nucleotides as set forth in SEQ ID NO 1685: GUUAAUGGAAUGUGU;
[0092] 15 contiguous nucleotides as set forth in SEQ ID NO 1686: CAGCUUUGCUACUGU;
[0093] 15 contiguous nucleotides as set forth in SEQ ID NO 1687: AGACUCUGGCUUAUU;
[0094] 15 contiguous nucleotides as set forth in SEQ ID NO 1688: GCAACAGUUCUUCAA;
[0095] and 15 contiguous nucleotides as set forth in SEQ ID NO 1689: AAAGCUAUUUUCAUA.

[0096] In some embodiments, the antisense strand is 21 nucleotides in length which comprises any one of the following:
[0097] 15 contiguous nucleotides as set forth in SEQ ID NO 1690: AGCUGUGCUUGACCC;
[0098] 15 contiguous nucleotides as set forth in SEQ ID NO 1691: UGGAUAGCUGUGCUU;
[0099] 15 contiguous nucleotides as set forth in SEQ ID NO 1692: UCUGAUGGAUAGCUG;
[0100] 15 contiguous nucleotides as set forth in SEQ ID NO 1693: GAUCAUCUGAUGGAU;
[0101] 15 contiguous nucleotides as set forth in SEQ ID NO 1694: AAGUAGAUCAUCUGA;
[0102] 15 contiguous nucleotides as set forth in SEQ ID NO 1695: AAGUAGAUCAUCUGA;
[0103] 15 contiguous nucleotides as set forth in SEQ ID NO 1696: AUUGUCUGGGACUCA;
[0104] 15 contiguous nucleotides as set forth in SEQ ID NO 1697: AUUUGCUGCUUGGCU;
[0105] 15 contiguous nucleotides as set forth in SEQ ID NO 1698: UUAUUCUGGGACGAC;
[0106] 15 contiguous nucleotides as set forth in SEQ ID NO 1699: AGUAGCAAAGCUGAU;
[0107] 15 contiguous nucleotides as set forth in SEQ ID NO 1700: UCUGUGACAGUAGCA;
[0108] 15 contiguous nucleotides as set forth in SEQ ID NO 1701: UCUGUGACAGUAGCA;
[0109] 15 contiguous nucleotides as set forth in SEQ ID NO 1702: AUCCUCAAGCAAAGA;
[0110] 15 contiguous nucleotides as set forth in SEQ ID NO 1703: AGUUUCAGGACACCA;
[0111] 15 contiguous nucleotides as set forth in SEQ ID NO 1704: AGUUGCAGUUUCAGG;
[0112] 15 contiguous nucleotides as set forth in SEQ ID NO 1705: ACUGUGCUGUUGCCU;
[0113] 15 contiguous nucleotides as set forth in SEQ ID NO 1706: AUCUUAAGCUCUAGG;
[0114] 15 contiguous nucleotides as set forth in SEQ ID NO 1707: GGCUCGGAUCUUAAG;
[0115] 15 contiguous nucleotides as set forth in SEQ ID NO 1708: AGUCUACGUAAUGGU;
[0116] 15 contiguous nucleotides as set forth in SEQ ID NO 1709: AUUGUUGGCUUUGAG;
[0117] 15 contiguous nucleotides as set forth in SEQ ID NO 1710: AUGAUCCAGGUAGAG;
[0118] 15 contiguous nucleotides as set forth in SEQ ID NO 1711: AUUGCCAUUAUGAUC;
[0119] 15 contiguous nucleotides as set forth in SEQ ID NO 1712: UCAUCUUGGUCUCUU;
[0120] 15 contiguous nucleotides as set forth in SEQ ID NO 1713: AGUCAUAUUGCCAGG;
[0121] 15 contiguous nucleotides as set forth in SEQ ID NO 1714: ACAAGAAAGUGCCCA;
[0122] 15 contiguous nucleotides as set forth in SEQ ID NO 1715: AGUCUCAGACAAGAA;
[0123] 15 contiguous nucleotides as set forth in SEQ ID NO 1716: UAAGCCAGAGUCUCA;
[0124] 15 contiguous nucleotides as set forth in SEQ ID NO 1717: UUACCCAUCUCCCAA;
[0125] 15 contiguous nucleotides as set forth in SEQ ID NO 1718: AACGCUUUACCCAUC;
[0126] 15 contiguous nucleotides as set forth in SEQ ID NO 1719: UAGAAGAAACGCUUU;
[0127] 15 contiguous nucleotides as set forth in SEQ ID NO 1720: AGACCCCUUUAGAAG;
[0128] 15 contiguous nucleotides as set forth in SEQ ID NO 1721: CAUGCUUUCUGGGUA;
[0129] 15 contiguous nucleotides as set forth in SEQ ID NO 1722: CUUCUCACAGGACUU;
[0130] 15 contiguous nucleotides as set forth in SEQ ID NO 1723: UUUUUCUCUGCCUUC;
[0131] 15 contiguous nucleotides as set forth in SEQ ID NO 1724: AGUAAUUUUUCUCUG;
[0132] 15 contiguous nucleotides as set forth in SEQ ID NO 1725: UUUCUCAUCUUGGGA;
[0133] 15 contiguous nucleotides as set forth in SEQ ID NO 1726: UCUAUCUGCUUCCUC;
[0134] 15 contiguous nucleotides as set forth in SEQ ID NO 1727: AAGGUACCUCAACAG;
[0135] 15 contiguous nucleotides as set forth in SEQ ID NO 1728: UCCCUUAAGGUACCU;
[0136] 15 contiguous nucleotides as set forth in SEQ ID NO 1729: UUUUCCUGACUCCUG;
[0137] 15 contiguous nucleotides as set forth in SEQ ID NO 1730: AAAUGCUUGUCUCCC;
[0138] 15 contiguous nucleotides as set forth in SEQ ID NO 1731: AGUAUAAAUGCUUGU;
[0139] 15 contiguous nucleotides as set forth in SEQ ID NO 1732: AAGAAAGUAUAAAUG;
[0140] 15 contiguous nucleotides as set forth in SEQ ID NO 1733: UUGUUGAUUUUCUUU;
[0141] 15 contiguous nucleotides as set forth in SEQ ID NO 1734: UAUGACUCACAUUUG;
[0142] 15 contiguous nucleotides as set forth in SEQ ID NO 1735: ACCCUUCUUUAUGAC;
[0143] 15 contiguous nucleotides as set forth in SEQ ID NO 1736: AAGAACUGUUGCUCU;
[0144] 15 contiguous nucleotides as set forth in SEQ ID NO 1737: ACUUUGUGGACACCC;
[0145] 15 contiguous nucleotides as set forth in SEQ ID NO 1738: CUUUGACUUUGUGGA;
[0146] 15 contiguous nucleotides as set forth in SEQ ID NO 1739: AAUAGCUUUGACUUU;
[0147] 15 contiguous nucleotides as set forth in SEQ ID NO 1740: UAUGAAAAUAGCUUU;
[0148] 15 contiguous nucleotides as set forth in SEQ ID NO 1741: UAUUAUUAUGAAAAU;
[0149] 15 contiguous nucleotides as set forth in SEQ ID NO 1742: ACAUGUUAGUAUUAU;
[0150] 15 contiguous nucleotides as set forth in SEQ ID NO 1743: AAAUAACAUGUUAGU;
[0151] 15 contiguous nucleotides as set forth in SEQ ID NO 1744: AAAGGCAAAUAACAU;
[0152] 15 contiguous nucleotides as set forth in SEQ ID NO 1745: AUUCAAAAGGCAAAU;
[0153] 15 contiguous nucleotides as set forth in SEQ ID NO 1746: AAUGAGAAUUCAAAA;
[0154] 15 contiguous nucleotides as set forth in SEQ ID NO 1747: UUAAGAUAAUGAGAA;
[0155] 15 contiguous nucleotides as set forth in SEQ ID NO 1748: ACAAUUUUAAGAUAA;
[0156] 15 contiguous nucleotides as set forth in SEQ ID NO 1749: AAUCACAUGUCACAC;
[0157] 15 contiguous nucleotides as set forth in SEQ ID NO 1750: AUGAUGUAAUCACAU;
[0158] 15 contiguous nucleotides as set forth in SEQ ID NO 1751: AGAAAGAUGAUGUAA;
[0159] 15 contiguous nucleotides as set forth in SEQ ID NO 1752: UGAUGUCAGAAAGAU;
[0160] 15 contiguous nucleotides as set forth in SEQ ID NO 1753: AACAAUGAUGUCAGA;
[0161] 15 contiguous nucleotides as set forth in SEQ ID NO 1754: ACACAUUCCAUUAAC;
[0162] 15 contiguous nucleotides as set forth in SEQ ID NO 1755: ACAGUAGCAAAGCUG;
[0163] 15 contiguous nucleotides as set forth in SEQ ID NO 1756: AAUAAGCCAGAGUCU;
[0164] 15 contiguous nucleotides as set forth in SEQ ID NO 1757: UUGAAGAACUGUUGC;
[0165] and 15 contiguous nucleotides as set forth in SEQ ID NO 1758: UAUGAAAAUAGCUUU.

[0166] In some embodiments, the sense strand of the disclosure is derived from the mRNA sequence of human INHBE (e.g., Gene ID: 83729, NCBI Reference Sequence: NM_031479.5 (SEQ ID NO: 1619)). Alternatively, the sense strand of the disclosure is derived from a fragment of the mRNA sequence of human INHBE. In some embodiments, the sense strand of the disclosure is derived from the mRNA sequence of cynomolgus monkey INHBE (e.g., Gene ID: 102127493, NCBI Reference Sequence: XM_005571319.3 (SEQ ID NO: 1620)). Alternatively, the sense strand of the disclosure is derived from a fragment of the mRNA sequence of cynomolgus monkey INHBE. The mRNA sequences for human and cynomolgus monkey INHBE are shown in FIGS. 29 and 30.

[0167] In some embodiments, the dsRNAi agent or RNA of the disclosure comprises any one of the antisense strand sequences or sense strand sequences shown in Table 1 or Table 2. In some embodiments, the dsRNAi agent or RNA comprises any one of the antisense strand sequences or sense strand sequences set forth in SEQ ID NOs: 1-1590. In some embodiments, the dsRNAi agent or RNA comprises any one of the antisense strand sequences or sense strand sequences set forth in SEQ ID NOs: 1759-1874.

[0168] In some embodiments, the dsRNAi agent or RNA comprises an antisense strand sequence and a sense strand sequence shown in any one of the duplex sequences in Table 1 or Table 2. In some embodiments, the dsRNAi agent or RNA comprises any one of the duplex sequences selected from IN-001-IN-488 and INI-001-INI-308. In some embodiments, the dsRNAi agent or RNA comprises any one of the duplex sequences selected from IN-489 to IN-546.

[0169] In some embodiments, at least one nucleotide in the sense strand and/or the antisense strand is a modified nucleotide. In some such embodiments, the modified nucleotide is a non-canonical base pairing nucleotide.

[0170] In some embodiments, at least one nucleotide in the sense strand and the antisense strand is a modified nucleotide. In some such embodiments, the modified nucleotide is a non-canonical base pairing nucleotide.

[0171] In some embodiments, at least one nucleotide in the sense strand or the antisense strand is a modified nucleotide. In some such embodiments, the modified nucleotide is a non-canonical base pairing nucleotide.

[0172] In some embodiments, substantially all the nucleotides in the sense strand and/or the antisense strand are modified nucleotides. In some such embodiments, at least one of the modified nucleotides is a non-canonical base pairing nucleotide.

[0173] In some embodiments, substantially all the nucleotides in the sense strand and the antisense strand are modified nucleotides. In some such embodiments, at least one of the modified nucleotides is a non-canonical base pairing nucleotide.

[0174] In some embodiments, substantially all the nucleotides in the sense strand or the antisense strand are modified nucleotides. In some such embodiments, at least one of the modified nucleotides is a non-canonical base pairing nucleotide.

[0175] In some embodiments, all the nucleotides in the sense strand and the antisense strand are modified nucleotides. In some such embodiments, at least one of the modified nucleotides is a non-canonical base pairing nucleotide.

[0176] In some embodiments, all the nucleotides in the sense strand are modified nucleotides. In some such embodiments, at least one of the modified nucleotides is a non-canonical base pairing nucleotide.

[0177] In some embodiments, all the nucleotides in the antisense strand are modified nucleotides. In some such embodiments, at least one of the modified nucleotides is a non-canonical base pairing nucleotide.

[0178] In some embodiments, the modified nucleotide is selected from: 2′-O-methyl-modified nucleotide, 2′-fluoro-modified nucleotide, 2′-deoxy nucleotide, 2′-methoxyethyl-modified nucleotide, 2′-amino-modified nucleotide, 2′-alkyl-modified nucleotide, 2′-alkoxy-modified nucleotide, 2′-F-arabino nucleotide, phosphorothioate-modified nucleotides, abasic nucleotides, morpholino nucleotide, locked nucleotide, inverted nucleotide, and hypoxanthin base-substituted nucleotide (e.g., inosine).

[0179] In some embodiments, the modified nucleotide is selected from: 2′-O-methyl-modified nucleotide, 2′-fluoro-modified nucleotide, 2′-deoxy nucleotide, phosphorothioate-modified nucleotide, and inverted base nucleotide (reverse linkage). In some such embodiments, the inverted base nucleotide is selected from: inverted A nucleotide, inverted dA nucleotide, inverted dT nucleotide, inverted C nucleotide and inverted U nucleotide.

[0180] In some embodiments, the modified nucleotide includes any one or combination of the following:
[0181] (1) According to the direction from the 5′ end to the 3′ end, the nucleotides at positions 2, 4, 12, and 14 of the antisense strand are 2′-fluoro-modified nucleotides, and the nucleotides at the remaining positions are 2′-O-methyl-modified nucleotides;
[0182] (2) According to the direction from the 5′ end to the 3′ end, the nucleotides at positions 7, 8, and 9 of the sense strand are 2′-fluoro-modified nucleotides;
[0183] (3) According to the direction from the 5′ end to the 3′ end, guanine (the base group of G) at positions 2-8 of the antisense strand is replaced by hypoxanthine (the base group of inosine, I).

[0184] In some such embodiments, the modified nucleotide for the base replacement by hypoxanthine at positions 2-8 of the antisense strand further meets any one or combination of the following characteristics:
[0185] (i) According to the direction from the 5′ end to the 3′ end, the guanine at positions 6-8 of the antisense strand is replaced by hypoxanthine (I);
[0186] (ii) According to the direction from the 5′ end to the 3′ end, the guanine in G₀ in the sequence N₁N₂G₀N₃N₄ of the antisense strand is replaced by hypoxanthine (I) if at least 3 bases of N₁, N₂, N₃ and N₄ are adenine (A) or uracil (U);
[0187] (iii) According to the direction from the 5′ end to the 3′ end, the total number of adenine (A) and uracil (U) at positions 2-8 of the antisense strand is no less than 4; and/or
[0188] (iv) at least one guanine in G nucleotide in the antisense strand is replaced by hypoxanthine (I), wherein the hypoxanthine replacement causes a difference in melting temperature (ΔTm) of at least 2° C., of 2° C., or of over 2° C., for a dsRNA comprising the antisense strand with hypoxanthine replacement compared to the same dsRNA where the guanine (G) has not been replaced by hypoxanthine (I).

[0189] In some embodiments, the antisense strand comprises completely contiguous nucleotide sequence selected from SEQ ID NO: 86, 182, 212, 350, 376, 402, 440, 460, 462, 464, 466, 468, 470, 472, 474, 476, 478, 480, 482, 484, 486, 488, 490, 492, 494, 496, 498, 500, 502, 504, 506, 508, 510, 512, 514, 516, 518, 520, 522, 524, 526, 528, 530, 532, 534, 536, 538, 540, 542, 544, 546, 548, 550, 552, 554, 556, 558, 560, 562, 564, 566, 568, 570, 572, 574, 576, 578, 580, 582, 584, 586, 588, 590, 592, 594, 596, 598, 600, 602, 604, 606, 608, 610, 612, 614, 616, 618, 620, 622, 624, 626, 628, 630, 632, 634, 636, 638, 640, 642, 644, 646, 648, 650, 652, 654, 656, 658, 660, 662, 664, 666, 668, 670, 672, 674, 676, 678, 680, 682, 684, 686, 688, 690, 692, 694, 696, 698, 700, 702, 704, 706, 708, 710, 712, 714, 716, 718, 720, 722, 724, 726, 728, 730, 732, 734, 736, 738, 740, 742, 744, 746, 748, 750, 752, 754, 756, 758, 760, 762, 764, 766, 768, 770, 772, 774, 776, 778, 780, 782, 784, 786, 788, 790, 792, 794, 796, 798, 800, 802, 804, 806, 808, 810, 812, 814, 816, 818, 820, 822, 824, 826, 828, 830, 832, 834, 836, 838, 840, 842, 844, 846, 848, 850, 852, 854, 856, 858, 860, 862, 864, 866, 868, 870, 872, 874, 876, 878, 880, 882, 884, 886, 888, 890, 892, 894, 896, 898, 900, 902, 904, 906, 908, 910, 912, 914, 916, 918, 920, 922, 924, 926, 928, 930, 932, 934, 936, 938, 940, 942, 944, 946, 948, 950, 952, 954, 956, 958, 960, 962, 964, 966, 968, 970, 972, 974, 1760, 1762, 1764, 1766, 1768, 1770, 1772, 1774, 1776, 1778, 1780, 1782, 1784, 1786, 1788, 1790, 1792, 1794, 1796, 1798, 1800, 1802, 1804, 1806, 1808, 1810, 1812, 1814, 1816, 1818, 1820, 1822, 1824, 1826, 1828, 1830, 1832, 1834, 1836, 1838, 1840, 1842, 1844, 1846, 1848, 1850, 1852, 1854, 1856, 1858, 1860, 1862, 1864, 1866, 1868, 1870, 1872 or 1874.

[0190] In some embodiments, the sense strand comprises completely contiguous nucleotide sequence selected from SEQ ID NO: 85, 181, 211, 349, 375, 401, 439, 459, 461, 463, 465, 467, 469, 471, 473, 475, 477, 479, 481, 483, 485, 487, 489, 491, 493, 495, 497, 499, 501, 503, 505, 507, 509, 511, 513, 515, 517, 519, 521, 523, 525, 527, 529, 531, 533, 535, 537, 539, 541, 543, 545, 547, 549, 551, 553, 555, 557, 559, 561, 563, 565, 567, 569, 571, 573, 575, 577, 579, 581, 583, 585, 587, 589, 591, 593, 595, 597, 599, 601, 603, 605, 607, 609, 611, 613, 615, 617, 619, 621, 623, 625, 627, 629, 631, 633, 635, 637, 639, 641, 643, 645, 647, 649, 651, 653, 655, 657, 659, 661, 663, 665, 667, 669, 671, 673, 675, 677, 679, 681, 683, 685, 687, 689, 691, 693, 695, 697, 699, 701, 703, 705, 707, 709, 711, 713, 715, 717, 719, 721, 723, 725, 727, 729, 731, 733, 735, 737, 739, 741, 743, 745, 747, 749, 751, 753, 755, 757, 759, 761, 763, 765, 767, 769, 771, 773, 775, 777, 779, 781, 783, 785, 787, 789, 791, 793, 795, 797, 799, 801, 803, 805, 807, 809, 811, 813, 815, 817, 819, 821, 823, 825, 827, 829, 831, 833, 835, 837, 839, 841, 843, 845, 847, 849, 851, 853, 855, 857, 859, 861, 863, 865, 867, 869, 871, 873, 875, 877, 879, 881, 883, 885, 887, 889, 891, 893, 895, 897, 899, 901, 903, 905, 907, 909, 911, 913, 915, 917, 919, 921, 923, 925, 927, 929, 931, 933, 935, 937, 939, 941, 943, 945, 947, 949, 951, 953, 955, 957, 959, 961, 963, 965, 967, 969, 971, 973, 1759, 1761, 1763, 1765, 1767, 1769, 1771, 1773, 1775, 1777, 1779, 1781, 1783, 1785, 1787, 1789, 1791, 1793, 1795, 1797, 1799, 1801, 1803, 1805, 1807, 1809, 1811, 1813, 1815, 1817, 1819, 1821, 1823, 1825, 1827, 1829, 1831, 1833, 1835, 1837, 1839, 1841, 1843, 1845, 1847, 1849, 1851, 1853, 1855, 1857, 1859, 1861, 1863, 1865, 1867, 1869, 1871 or 1873.

[0191] In some embodiments, the dsRNAi agent comprises a sense strand sequence and an antisense strand sequence selected from the following pairs: SEQ ID NO: 85 and 86; SEQ ID NO: 181 and 182; SEQ ID NO: 211 and 212; SEQ ID NO: 349 and 350; SEQ ID NO: 375 and 376; SEQ ID NO: 401 and 402; SEQ ID NO: 439 and 440; SEQ ID NO:459 and 460; SEQ ID NO:461 and 462; SEQ ID NO:463 and 464; SEQ ID NO:465 and 466; SEQ ID NO:467 and 468; SEQ ID NO:469 and 470; SEQ ID NO 471 and 472; SEQ ID NO:473 and 474; SEQ ID NO:475 and 476; SEQ ID NO:477 and 478; SEQ ID NO:479 and 480; SEQ ID NO:481 and 482; SEQ ID NO:483 and 484; SEQ ID NO:485 and 486; SEQ ID NO:487 and 488; SEQ ID NO:489 and 490; SEQ ID NO:491 and 492; SEQ ID NO:493 and 494; SEQ ID NO:495 and 496; SEQ ID NO:497 and 498; SEQ ID NO:499 and 500; SEQ ID NO: 501 and 502; SEQ ID NO: 503 and 504; SEQ ID NO: 505 and 506; SEQ ID NO: 507 and 508; SEQ ID NO: 509 and 510; SEQ ID NO: 511 and 512; SEQ ID NO: 513 and 514; SEQ ID NO: 515 and 516; SEQ ID NO: 517 and 518; SEQ ID NO: 519 and 520; SEQ ID NO: 521 and 522; SEQ ID NO: 523 and 524; SEQ ID NO: 525 and 526; SEQ ID NO: 527 and 528; SEQ ID NO: 529 and 530; SEQ ID NO: 531 and 532; SEQ ID NO: 533 and 534; SEQ ID NO: 535 and 536; SEQ ID NO: 537 and 538; SEQ ID NO: 539 and 540; SEQ ID NO: 541 and 542; SEQ ID NO: 543 and 544; SEQ ID NO: 545 and 546; SEQ ID NO: 547 and 548; SEQ ID NO: 549 and 550; SEQ ID NO: 551 and 552; SEQ ID NO: 553 and 554; SEQ ID NO: 555 and 556; SEQ ID NO: 557 and 558; SEQ ID NO: 559 and 560; SEQ ID NO: 561 and 562; SEQ ID NO: 563 and 564; SEQ ID NO: 565 and 566; SEQ ID NO: 567 and 568; SEQ ID NO: 569 and 570; SEQ ID NO: 571 and 572; SEQ ID NO: 573 and 574; SEQ ID NO: 575 and 576; SEQ ID NO: 577 and 578; SEQ ID NO: 579 and 580; SEQ ID NO: 581 and 582; SEQ ID NO: 583 and 584; SEQ ID NO: 585 and 586; SEQ ID NO: 587 and 588; SEQ ID NO: 589 and 590; SEQ ID NO: 591 and 592; SEQ ID NO: 593 and 594; SEQ ID NO: 595 and 596; SEQ ID NO: 597 and 598; SEQ ID NO: 599 and 600; SEQ ID NO: 601 and 602; SEQ ID NO: 603 and 604; SEQ ID NO: 605 and 606; SEQ ID NO: 607 and 608; SEQ ID NO: 609 and 610; SEQ ID NO: 611 and 612; SEQ ID NO: 613 and 614; SEQ ID NO: 615 and 616; SEQ ID NO: 617 and 618; SEQ ID NO: 619 and 620; SEQ ID NO: 621 and 622; SEQ ID NO: 623 and 624; SEQ ID NO: 625 and 626; SEQ ID NO: 627 and 628; SEQ ID NO: 629 and 630; SEQ ID NO: 631 and 632; SEQ ID NO: 633 and 634; SEQ ID NO: 635 and 636; SEQ ID NO: 637 and 638; SEQ ID NO: 639 and 640; SEQ ID NO: 641 and 642; SEQ ID NO: 643 and 644; SEQ ID NO: 645 and 646; SEQ ID NO: 647 and 648; SEQ ID NO: 649 and 650; SEQ ID NO: 651 and 652; SEQ ID NO: 653 and 654; SEQ ID NO: 655 and 656; SEQ ID NO: 657 and 658; SEQ ID NO: 659 and 660; SEQ ID NO: 661 and 662; SEQ ID NO: 663 and 664; SEQ ID NO: 665 and 666; SEQ ID NO: 667 and 668; SEQ ID NO: 669 and 670; SEQ ID NO: 671 and 672; SEQ ID NO: 673 and 674; SEQ ID NO: 675 and 676; SEQ ID NO: 677 and 678; SEQ ID NO: 679 and 680; SEQ ID NO: 681 and 682; SEQ ID NO: 683 and 684; SEQ ID NO: 685 and 686; SEQ ID NO: 687 and 688; SEQ ID NO: 689 and 690; SEQ ID NO: 691 and 692; SEQ ID NO: 693 and 694; SEQ ID NO: 695 and 696; SEQ ID NO: 697 and 698; SEQ ID NO: 699 and 700; SEQ ID NO: 701 and 702; SEQ ID NO: 703 and 704; SEQ ID NO: 705 and 706; SEQ ID NO: 707 and 708; SEQ ID NO: 709 and 710; SEQ ID NO: 711 and 712; SEQ ID NO: 713 and 714; SEQ ID NO: 715 and 716; SEQ ID NO: 717 and 718; SEQ ID NO: 719 and 720; SEQ ID NO: 721 and 722; SEQ ID NO: 723 and 724; SEQ ID NO: 725 and 726; SEQ ID NO: 727 and 728; SEQ ID NO: 729 and 730; SEQ ID NO: 731 and 732; SEQ ID NO: 733 and 734; SEQ ID NO: 735 and 736; SEQ ID NO: 737 and 738; SEQ ID NO: 739 and 740; SEQ ID NO: 741 and 742; SEQ ID NO: 743 and 744; SEQ ID NO: 745 and 746; SEQ ID NO: 747 and 748; SEQ ID NO: 749 and 750; SEQ ID NO: 751 and 752; SEQ ID NO: 753 and 754; SEQ ID NO: 755 and 756; SEQ ID NO: 757 and 758; SEQ ID NO: 759 and 760; SEQ ID NO: 761 and 762; SEQ ID NO: 763 and 764; SEQ ID NO: 765 and 766; SEQ ID NO: 767 and 768; SEQ ID NO: 769 and 770; SEQ ID NO: 771 and 772; SEQ ID NO: 773 and 774; SEQ ID NO: 775 and 776; SEQ ID NO: 777 and 778; SEQ ID NO: 779 and 780; SEQ ID NO: 781 and 782; SEQ ID NO: 783 and 784; SEQ ID NO: 785 and 786; SEQ ID NO: 787 and 788; SEQ ID NO: 789 and 790; SEQ ID NO: 791 and 792; SEQ ID NO: 793 and 794; SEQ ID NO: 795 and 796; SEQ ID NO: 797 and 798; SEQ ID NO: 799 and 800; SEQ ID NO: 801 and 802; SEQ ID NO: 803 and 804; SEQ ID NO: 805 and 806; SEQ ID NO: 807 and 808; SEQ ID NO: 809 and 810; SEQ ID NO: 811 and 812; SEQ ID NO: 813 and 814; SEQ ID NO: 815 and 816; SEQ ID NO: 817 and 818; SEQ ID NO: 819 and 820; SEQ ID NO: 821 and 822; SEQ ID NO: 823 and 824; SEQ ID NO: 825 and 826; SEQ ID NO: 827 and 828; SEQ ID NO: 829 and 830; SEQ ID NO: 831 and 832; SEQ ID NO: 833 and 834; SEQ ID NO: 835 and 836; SEQ ID NO: 837 and 838; SEQ ID NO: 839 and 840; SEQ ID NO: 841 and 842; SEQ ID NO: 843 and 844; SEQ ID NO: 845 and 846; SEQ ID NO: 847 and 848; SEQ ID NO: 849 and 850; SEQ ID NO: 851 and 852; SEQ ID NO: 853 and 854; SEQ ID NO: 855 and 856; SEQ ID NO: 857 and 858; SEQ ID NO:859 and 860; SEQ ID NO:861 and 862; SEQ ID NO: 863 and 864; SEQ ID NO:865 and 866; SEQ ID NO:867 and 868; SEQ ID NO:869 and 870; SEQ ID NO:871 and 872; SEQ ID NO:873 and 874; SEQ ID NO:875 and 876; SEQ ID NO:877 and 878; SEQ ID NO:879 and 880; SEQ ID NO:881 and 882; SEQ ID NO:883 and 884; SEQ ID NO:885 and 886; SEQ ID NO:887 and 888; SEQ ID NO:889 and 890; SEQ ID NO:891 and 892; SEQ ID NO:893 and 894; SEQ ID NO:895 and 896; SEQ ID NO:897 and 898; SEQ ID NO:899 and 900; SEQ ID NO:901 and 902; SEQ ID NO:903 and 904; SEQ ID NO:905 and 906; SEQ ID NO:907 and 908; SEQ ID NO:909 and 910; SEQ ID NO: 911 and 912; SEQ ID NO:913 and 914; SEQ ID NO:915 and 916; SEQ ID NO:917 and 918; SEQ ID NO:919 and 920; SEQ ID NO:921 and 922; SEQ ID NO:923 and 924; SEQ ID NO:925 and 926; SEQ ID NO:927 and 928; SEQ ID NO:929 and 930; SEQ ID NO:931 and 932; SEQ ID NO:933 and 934; SEQ ID NO:935 and 936; SEQ ID NO:937 and 938; SEQ ID NO:939 and 940; SEQ ID NO:941 and 942; SEQ ID NO:943 and 944; SEQ ID NO:945 and 946; SEQ ID NO:947 and 948; SEQ ID NO:949 and 950; SEQ ID NO:951 and 952; SEQ ID NO:953 and 954; SEQ ID NO:955 and 956; SEQ ID NO:957 and 958; SEQ ID NO:959 and 960; SEQ ID NO:961 and 962; SEQ ID NO:963 and 964; SEQ ID NO:965 and 966; SEQ ID NO:967 and 968; SEQ ID NO:969 and 970; SEQ ID NO:971 and 972; SEQ ID NO:973 and 974; SEQ ID NO: 1759 and 1760; SEQ ID NO:1761 and 1762; SEQ ID NO:1763 and 1764; SEQ ID NO:1765 and 1766; SEQ ID NO:1767 and 1768; SEQ ID NO:1769 and 1770; SEQ ID NO:1771 and 1772; SEQ ID NO:1773 and 1774; SEQ ID NO:1775 and 1776; SEQ ID NO:1777 and 1778; SEQ ID NO:1779 and 1780; SEQ ID NO:1781 and 1782; SEQ ID NO:1783 and 1784; SEQ ID NO:1785 and 1786; SEQ ID NO:1787 and 1788; SEQ ID NO:1789 and 1790; SEQ ID NO:1791 and 1792; SEQ ID NO:1793 and 1794; SEQ ID NO:1795 and 1796; SEQ ID NO:1797 and 1798; SEQ ID NO:1799 and 1800; SEQ ID NO:1801 and 1802; SEQ ID NO:1803 and 1804; SEQ ID NO:1805 and 1806; SEQ ID NO:1807 and 1808; SEQ ID NO:1809 and 1810; SEQ ID NO:1811 and 1812; SEQ ID NO:1813 and 1814; SEQ ID NO:1815 and 1816; SEQ ID NO:1817 and 1818; SEQ ID NO:1819 and 1820; SEQ ID NO:1821 and 1822; SEQ ID NO:1823 and 1824; SEQ ID NO:1825 and 1826; SEQ ID NO:1827 and 1828; SEQ ID NO:1829 and 1830; SEQ ID NO:1831 and 1832; SEQ ID NO:1833 and 1834; SEQ ID NO:1835 and 1836; SEQ ID NO:1837 and 1838; SEQ ID NO:1839 and 1840; SEQ ID NO:1841 and 1842; SEQ ID NO:1843 and 1844; SEQ ID NO:1845 and 1846; SEQ ID NO:1847 and 1848; SEQ ID NO:1849 and 1850; SEQ ID NO:1851 and 1852; SEQ ID NO:1853 and 1854; SEQ ID NO:1855 and 1856; SEQ ID NO:1857 and 1858; SEQ ID NO:1859 and 1860; SEQ ID NO:1861 and 1862; SEQ ID NO:1863 and 1864; SEQ ID NO:1865 and 1866; SEQ ID NO:1867 and 1868; SEQ ID NO:1869 and 1870; SEQ ID NO:1871 and 1872; or, SEQ ID NO:1873 and 1874.

[0192] In some embodiments, the dsRNAi agent comprises a sense strand sequence and an antisense strand sequence selected from any one of duplexes IN-001-IN-488 and INI-001-INI-308. In some embodiments, the dsRNAi agent comprises a sense strand sequence and an antisense strand sequence selected from any one of duplexes IN-489 to IN-546.

[0193] In some embodiments, the antisense oligonucleotides of the disclosure are substantially complementary to the target mRNA, e.g., INHBE mRNA, and comprise a contiguous nucleotide sequence which is at least about 85% complementary over its entire length to any one of the sense strand oligonucleotides provided herein or a portion thereof, e.g., about 85%, 86%, 87%, 88%, 89%, 90%, 91%, 92%, 93%, 94%, 95%, 96%, 97%, 98%, or about 99% complementary.

[0194] In some embodiments, the antisense oligonucleotides of the disclosure are substantially complementary to any one of the sense strand oligonucleotides disclosed herein, and comprise a contiguous nucleotide sequence which is at least about 85% complementary over its entire length to any one of the sense strand oligonucleotides provided herein or a portion thereof, e.g., about 85%, 86%, 87%, 88%, 89%, 90%, 91%, 92%, 93%, 94%, 95%, 96%, 97%, 98%, or about 99% complementary.

[0195] In some embodiments, dsRNAi agent of the disclosure includes a sense strand that is substantially complementary to an antisense oligonucleotide which is, in turn, complementary to the target mRNA, e.g, INHBR mRNA, wherein the sense strand is at least about 85% complementary over its entire length to any one of the antisense strand oligonucleotides provided herein or a portion thereof, e.g., about 85%, 86%, 87%, 88%, 89%, 90%, 91%, 92%, 93%, 94%, 95%, 96%, 97%, 98%, or about 99% complementary.

[0196] In some embodiments, the double-stranded region of a dsRNAi agent is equal to or at least, 10, 11, 12, 13, 14, 15, 16, 17, 18, 19, 20, 21, 22, 23, 23, 24, 25, 26, 27, 28, 29, 30 or more nucleotide pairs in length.

[0197] In some embodiments, the antisense strand of a dsRNAi agent is equal to or at least 14, 15, 16, 17, 18, 19, 20, 21, 22, 23, 23, 24, 25, 26, 27, 28, 29, or 30 nucleotides in length.

[0198] In some embodiments, the sense strand of a dsRNAi agent is equal to or at least 10, 11, 12, 13, 14, 15, 16, 17, 18, 19, 20, 21, 22, 23, 23, 24, 25, 26, 27, 28, 29, or 30 nucleotides in length.

[0199] In some embodiments, the sense and antisense strands of the dsRNAi agent are each independently 15 to 30 nucleotides in length.

[0200] In some embodiments, the sense and antisense strands of the dsRNAi agent are each independently 19 to 25 nucleotides in length.

[0201] In some embodiments, the sense and antisense strands of the dsRNAi agent are each independently 21 to 23 nucleotides in length.

[0202] In some embodiments, the sense strand of the dsRNAi agent is 21 nucleotides in length, and the antisense strand is 23 nucleotides in length, wherein the strands form a double-stranded region of 21 consecutive base pairs having a 2-nucleotide long single stranded overhang at the 3′-end.

[0203] In another aspect, the present disclosure provides an RNAi agent comprising a dsRNA provided herein, and a targeting ligand. The targeting ligand is typically conjugated to the dsRNA and acts to target the RNAi agent to a cell.

[0204] In some embodiments, the dsRNAi agent comprises the dsRNA, and at least one targeting ligand conjugated thereto, e.g., conjugated to the sense strand of the dsRNA. In some such embodiments, the 3′ end of the sense strand is conjugated to the targeting ligand(s).

[0205] In some embodiments, the targeting ligand of the present disclosure specifically targets asialoglycoprotein receptors (ASGPR), e.g., on the surface of liver cells. In some such embodiments, the targeting ligand comprises N-acetyl-galactosamine (GalNAc), or, the targeting ligand is a GalNAc derivative. In some embodiments, the targeting ligand is any targeting moiety disclosed in WO2022266753A1. Unless obviously contradicted, the entire contents of WO2022266753A1 are hereby incorporated by reference.

[0206] In some embodiments, the dsRNAi agent has the structure selected from any one of formula 1 to formula 33, wherein R² is the dsRNA. According to common knowledge in the art, R² forms a dsRNAi agent by conjugating the 3′ end or the 5′ end of the sense strand to a targeting ligand. In some embodiments, the 3′ end of the sense strand is conjugated to the targeting ligand. In other embodiments, the 5′ end of the sense strand is conjugated to the targeting ligand.

[chemical structure]

[chemical structure]

[chemical structure]

[chemical structure]

[chemical structure]

[chemical structure]

[chemical structure]

[chemical structure]

[chemical structure]

[chemical structure]

[chemical structure]

[chemical structure]

[0207] In another aspect, the present disclosure provides a cell, a vector, a host cell, and/or a pharmaceutical composition comprising a dsRNAi agent or RNA described herein.

[0208] In some embodiments, the pharmaceutical composition comprises the dsRNAi agent or RNA, or a pharmaceutically acceptable salt thereof, and a pharmaceutically acceptable carrier. The pharmaceutical composition of the present disclosure can be practically used for the prevention and/or treatment of INHBE-associated diseases and disorders, as discussed further hereinbelow.

[0209] In some embodiments, the pharmaceutical composition is formulated for administration by injection or infusion, e.g., for intravenous, subcutaneous, intraperitoneal, or intramuscular administration. In some embodiments, the pharmaceutical composition is formulated for subcutaneous administration. In some embodiments, the pharmaceutical composition is formulated for intravenous administration.

[0210] In some embodiments, the carrier of the pharmaceutical composition is an unbuffered solution or a buffered solution. Typical unbuffered solutions include without limitation saline or water. Typical buffered solutions include without limitation one or more of acetate, citrate, prolamine, carbonate, phosphate, and any combination thereof. In some embodiments, a buffer solution is phosphate buffered saline (PBS).

[0211] In another aspect of the present disclosure, a method for inhibiting the expression of INHBE in a cell is provided. The method includes contacting the cell with a dsRNAi agent or RNA of the disclosure such that the mRNA transcript of the INHBE gene is degraded, thereby inhibiting expression of the INHBE gene in the cell.

[0212] In some embodiments, the cells are in a subject. In some embodiments, the cells are hepatocytes. In some embodiments, the cells are adipocytes. In some embodiments, the subject is a human.

[0213] In some embodiments, INHBE expression is inhibited by at least about 30%, at least about 35%, at least about 40%, at least about 45%, at least about 50%, at least about 55%, at least about 60%, at least about 65%, at least about 70%, at least about 75%, at least about 80%, at least about 85%, at least about 90% or at least about 95%.

[0214] In another aspect, the present disclosure provides methods of treating a subject having a disorder mediated by INHBE expression, e.g., an INHBE-associated disease or disorder. The methods comprise administering to the subject a therapeutically effective amount of the dsRNAi agent of the present disclosure, such that expression of the INHBE gene is inhibited in the subject.

[0215] In some embodiments, the subject is a human.

[0216] In some embodiments, the subject has a metabolic disorder.

[0217] In some embodiments, the metabolic disorder is one or more of metabolic syndrome, type 2 diabetes, obesity, pre-diabetes, elevated triglyceride levels, lipodystrophy, liver inflammation, fatty liver, hypercholesterolemia, disorders associated with elevated liver enzymes, nonalcoholic steatohepatitis, cardiovascular disease and kidney disease. The metabolic syndrome includes, but is not limited to, one or more of abdominal obesity, insulin resistance, hypertension, hyperlipidemia and dyslipidemia).

[0218] In some embodiments of methods of the disclosure, the inhibition of expression of the INHBE gene in the cell or in the subject reduces the protein level of the INHBE gene in the subject's serum by at least about 50%, at least about 60%, at least about 70%, at least about 80%, at least about 90%, or at least about 95%, as compared to the level before or without administration of the dsRNAi agent.

[0219] In some embodiments of methods of the disclosure, the dsRNAi agent is administered to the subject at a dose of about 0.01 mg/kg to about 50 mg/kg, or at a dose of about 0.10 mg/kg to about 50 mg/kg, for example, at a dose of about 0.01 mg/kg to about 10 mg/kg (e.g., about 3 mg/kg, about 4 mg/kg, about 5 mg/kg, about 6 mg/kg, about 7 mg/kg, about 8 mg/kg, or about 9 mg/kg), about 0.5 mg/kg to about 50 mg/kg, about 10 mg/kg to about 30 mg/kg, about 10 mg/kg to about 20 mg/kg, about 15 mg/kg to about 20 mg/kg, about 15 mg/kg to about 25 mg/kg, about 15 mg/kg to about 30 mg/kg, or about 20 mg/kg to about 30 mg/kg.

[0220] In some embodiments of methods of the disclosure, the method further comprises determining the level of INHBE in a sample from the subject. In some embodiments, the level of INHBE in a sample from the subject is determined before, during and/or after administering the dsRNAi agent to the subject. Any suitable sample may be used such as, for example and without limitation, a blood sample, a serum sample, or a sample of liver tissue.

[0221] In some embodiments of methods of the disclosure, the method further comprises administering to the subject an additional therapeutic agent to treat an INHBE-associated disorder or a metabolic disorder. Examples of such additional therapeutic agents include, without limitation: insulin, a glucagon-like peptide 1 (GLP-1) agonist, a glucose-dependent insulinotropic polypeptide (GIP) receptor agonist, a glucagon receptor agonist, a sulfonylurea, a seglitinide, a biguanide, a thiazolidinedione, an alpha-glucosidase inhibitor, an SGLT2 inhibitor, a DPP-4 inhibitor, an HMG-CoA reductase inhibitor, a statin, and any combination of the foregoing.

[0222] In some embodiments, the dsRNAi agent of the disclosure may be administered simultaneously or sequentially with an additional therapeutic agent. In some embodiments, the dsRNAi agent is administered before or after an additional therapeutic agent, such as a standard therapeutic agent for an INHBE-associated disorder or a metabolic disorder.

### BRIEF DESCRIPTION OF THE DRAWINGS

[0223] The patent or application file contains at least one drawing executed in color. Copies of this patent or patent application publication with color drawing(s) will be provided by the Office upon request and payment of the necessary fee.

[0224] For a better understanding of the invention and to show more clearly how it may be carried into effect, reference will now be made by way of example to the accompanying drawings, which illustrate aspects and features according to embodiments of the present invention, and in which:

[0225] FIGS. 1-4, 5A and 5B are graphs of relative INHBE mRNA level vs. siRNA concentration and show the results of detecting the knockdown activity of the indicated siRNA on human INHBE in HEP3B cells using rt-PCR (full curve).

[0226] FIG. 6 shows the results of using the reporter gene method to detect the knockdown activity (single dose) of siRNA on human (top) and mouse (bottom) INHBE.

[0227] FIGS. 7 and 8 show the results of using the reporter gene method to detect the knockdown activity of siRNA on human INHBE (3 doses).

[0228] FIG. 9 shows the results of detecting the knockdown activity (3 doses) of siRNA on mouse INHBE using the reporter gene method.

[0229] FIGS. 10-15 show the results of using the reporter gene method to detect the knockdown activity of siRNA on human INHBE (full curve).

[0230] FIG. 16 shows the results of detecting siRNA knockdown activity (full curve) on murine INHBE using the reporter gene method.

[0231] FIGS. 17-19 and FIG. 21 show the results of using the reporter gene method to detect the knockdown activity of siRNA on human INHBE (3 doses).

[0232] FIG. 20 and FIG. 22 show the result of using the reporter gene method to detect the knockdown activity of siRNA on human INHBE (2 doses).

[0233] FIGS. 23 and 24 show the result of using the reporter gene method to detect the knockdown activity of siRNA on human INHBE (full curve).

[0234] FIG. 25 shows the results of siRNA stability test in serum.

[0235] FIG. 26 shows the results of siRNA stability test in human liver S9 fraction.

[0236] FIG. 27 shows the changes in siRNA content in the liver of each group (3 mice per group) at different time points after administration.

[0237] FIG. 28 shows the percentage of different siRNA content in the mouse liver normalized to each siRNA content in the liver tissue of mice (3 mice per group) 7 days after administration.

[0238] FIG. 29 shows the mRNA sequence for human INHBE.

[0239] FIG. 30 shows the mRNA sequence for cynomolgus monkey INHBE.

### DETAILED DESCRIPTION

[0240] The present disclosure provides RNAi agents and compositions which effect the RNA-induced silencing complex (RISC)-mediated cleavage of RNA transcripts of the target gene inhibin subunit beta E (INHBE). The gene may be within a cell, such as an adipocyte and/or a hepatocyte or other liver cell, e.g., a cell within a subject, such as a human. The use of these RNAi agents and compositions enables the targeted degradation of INHBE mRNAs in mammals. As inhibitors of INHBE expression, RNAi agents and compositions of the disclosure are useful for the prevention, treatment, and/or inhibition of INHBE-associated diseases or disorders, such as metabolic syndrome and related conditions.

[0241] Accordingly, the present disclosure provides methods for treating, preventing or inhibiting an INHBE-associated disease or disorder, such as without limitation a metabolic disorder, e.g., metabolic syndrome; a disorder of carbohydrates, e.g., type II diabetes, pre-diabetes; a lipid metabolism disorder, e.g., a hyperlipidemia, hypertension, lipodystrophy; a kidney disease; a cardiovascular disease; or a disorder of body weight, e.g., obesity, overweight; using RNAi compositions which effect the RNA-induced silencing complex (RISC)-mediated cleavage of RNA transcripts of the inhibin subunit beta E (INHBE) target gene.

[0242] The RNAi agents of the disclosure comprise an antisense RNA strand having a region which is up to about 30 nucleotides or less in length, e.g., 19-30, 19-29, 19-28, 19-27, 19-26, 19-25, 19-24, 19-23, 19-22, 19-21, 19-20, 20-30, 20-29, 20-28, 20-27, 20-26, 20-25, 20-24,20-23, 20-22, 20-21, 21-30, 21-29, 21-28, 21-27, 21-26, 21-25, 21-24, 21-23, 21-22, 15, 15-16, 15-17, 15-20, 15-21, 15-22, 15-23, 15-17, or at least 15 nucleotides in length, which region is substantially complementary to at least part of an mRNA transcript of the INHBE target gene.

[0243] In certain embodiments, one or both of the strands of the dsRNAi agents of the disclosure is up to 66 nucleotides in length, e.g., 36-66, 26-36, 25-36, 31-60, 22-43, or 27-53 nucleotides in length, with a region of at least 15 contiguous nucleotides that is substantially complementary to at least a part of an mRNA transcript of the INHBE target gene. In some embodiments, such RNAi agents having longer length antisense strands may, for example, include a second RNA strand (the sense strand) of 20-60 nucleotides in length wherein the sense and antisense strands form a double-stranded region (duplex) of 15-30 contiguous nucleotides.

[0244] The use of RNAi agents of the disclosure enables the targeted degradation of mRNAs of the INHBE target gene in mammals. The present inventors have demonstrated that RNAi agents of the disclosure can effect the RNA-induced silencing complex (RISC)-mediated cleavage of INHBE RNA transcripts, resulting in significant inhibition of expression of the INHBE target gene. In certain embodiments, RNAi agents of the disclosure are more effective (e.g., more potent) and/or more specific (e.g., more safe, less off-target effects) than previous RNAi agents targeting the same gene. In certain embodiments, RNAi agents target specific sites in the INHBE mRNA and/or include modifications of the RNA (e.g., modified nucleotides, chemical modifications) selected to increase efficacy, potency, specificity, and/or safety, as described. In some such embodiments, RNAi agents comprise at least one modified nucleotide, such as a non-canonical base pairing nucleotide. Methods and compositions comprising these RNAi agents are useful for treating a subject having an INHBE-associated disease or disorder, e.g., a metabolic disorder. Accordingly, there are provided methods for treating, preventing or inhibiting a metabolic disorder in a subject who would benefit from inhibiting or reducing INHBE expression using RNAi agents and compositions of the disclosure.

[0245] The present disclosure also provides methods for preventing at least one symptom in a subject having a disorder that would benefit from inhibiting or reducing INHBE expression. The following detailed description discloses how to make and use RNAi agents and compositions thereof to inhibit the expression of the INHBE target gene, as well as compositions, uses, and methods for treating subjects that would benefit from inhibition and/or reduction of the expression of the INHBE target gene, e.g., subjects susceptible to or diagnosed with a metabolic disorder.

### Definitions

[0246] In order to provide a clear and consistent understanding of the terms used in the present specification, a number of definitions are provided below. Moreover, unless defined otherwise, all technical and scientific terms as used herein have the same meaning as commonly understood to one of ordinary skill in the art to which this invention pertains.

[0247] The use of the word “a” or “an” when used in conjunction with the term “comprising” in the claims and/or the specification may mean “one”, but it is also consistent with the meaning of “one or more”, “at least one”, and “one or more than one”. Similarly, the word “another” may mean at least a second or more.

[0248] The term “or” is used herein to mean, and is used interchangeably with, the term “and/or”, unless context clearly indicates otherwise. For example, “sense strand or antisense strand” is understood as “sense strand or antisense strand or sense strand and antisense strand.”

[0249] As used in this specification and claim(s), the words “comprising” (and any form of comprising, such as “comprise” and “comprises”), “having” (and any form of having, such as “have” and “has”), “including” (and any form of including, such as “include” and “includes”) and “containing” (and any form of containing, such as “contain” and “contains”), are inclusive or open-ended and do not exclude additional, unrecited elements or process steps.

[0250] The term “about” is used herein to indicate that a value includes an inherent variation of error for the device or the method being employed to determine the value. The term “about” when used in conjunction with a numerical value is meant to encompass a numerical value within a range having a lower limit of 5% less and an upper limit of 5% greater than the stated numerical value, including but not limited to ±5%, ±2%, ±1%, and +0.1%, as these variations are suitable for performing the disclosed methods. When about is present before a series of numbers or a range, it is understood that “about” can modify each of the numbers in the series or range.

[0251] The term “at least”, “no less than”, or “or more” prior to a number or series of numbers is understood to include the number adjacent to the term “at least”, and all subsequent numbers or integers that could logically be included, as clear from context. For example, the number of nucleotides in a nucleic acid molecule must be an integer. For example, “at least 15 nucleotides of a 17 nucleotide nucleic acid molecule” means that 15, 16, or 17 nucleotides have the indicated property. When “at least” is present before a series of numbers or a range, it is understood that “at least” can modify each of the numbers in the series or range.

[0252] As used herein, “no more than” or “or less” is understood as the value adjacent to the phrase and logical lower values or integers, as logical from context, to zero. For example, a duplex with an overhang of “no more than 2 nucleotides” has a 2, 1, or 0 nucleotide overhang. When “no more than” is present before a series of numbers or a range, it is understood that “no more than” can modify each of the numbers in the series or range. As used herein, ranges include both the upper and lower limit.

[0253] The term “inhibin subunit beta E” is used interchangeably with the term “INHBE”, and is also known as inhibin beta E chain, inhibin beta E, inhibin R E, activin E, activin R E, activin beta E and MGC4638. The sequence of a human INHBE mRNA transcript can be found at, for example, GenBank Accession No. NM_031479.5. The sequence of mouse INHBE mRNA can be found at, for example, GenBank Accession No. NM_008382.3 (SEQ ID NO: 1875). The sequence of cynomolgus monkey INHBE mRNA can be found at, for example, GenBank Accession No. XM_005571319.3. Additional examples of INHBE mRNA sequences are readily available through publicly available databases, e.g., GenBank, UniProt, OMIM, and the Macaca genome project web site. Further information on INHBE can be found, for example, at www.ncbi.nlm.nih.gov/gene/?term=INHBE. The entire contents of each of the foregoing GenBank Accession numbers and the Gene database numbers are incorporated herein by reference as of the date of filing this application.

[0254] The term “target sequence” or “target nucleic acid” or “target mRNA” refers to a contiguous portion of the nucleotide sequence of an mRNA molecule formed during the transcription of a target gene, including mRNA that is a product of RNA processing of a primary transcription product. In one embodiment, the target portion of the sequence is at least long enough to serve as a substrate for RNAi-directed cleavage at or near that portion of the nucleotide sequence of an mRNA molecule formed during the transcription of a target gene. In one embodiment, the target sequence is within the protein coding region of the target gene. In another embodiment, the target sequence is within the 3′ UTR of the target gene. The target nucleic acid can be a cellular gene (or mRNA transcribed from the gene) whose expression is associated with a particular disorder or disease state. In some embodiments, the target sequence is from about 19-36 nucleotides in length, e.g., about 19-30 nucleotides in length, e.g., 19-30, 19-29, 19-28, 19-27, 19-26, 19-25, 19-24, 19-23, 19-22, 19-21, 19-20, 20-30, 20-29, 20-28, 20-27, 20-26, 20-25, 20-24, 20-23, 20-22, 20-21, 21-30, 21-29, 21-28, 21-27, 21-26, 21-25, 21-24, 21-23, or 21-22 nucleotides in length. In some embodiments, the target sequence is from about 15-30 nucleotides in length, e.g., about 15-23 nucleotides in length, e.g., 15-30, 15-29, 15-28, 15-27, 15-26, 15-25, 15-24, 15-23, 15-22, 15-21, 15-20, 17-30, 17-29, 18-28, 17-27, 16-26, 15-25, 15-24, 16-23, 16-22, 16-21, 16-30, 16-29, 16-28, 16-27, 16-26, 16-25, 16-24, 17-25, 17-23, or 15-17 nucleotides in length. In certain embodiments, the target sequence is 17-25 nucleotides in length, 19-21 nucleotides in length, 19-23 nucleotides in length, or 21-23 nucleotides in length. Ranges and lengths intermediate to the above recited ranges and lengths are also contemplated to be part of the disclosure.

[0255] As used herein, the term “strand comprising a sequence” refers to an oligonucleotide comprising a chain of nucleotides that is described by the sequence referred to using the standard nucleotide nomenclature.

[0256] The terms “siRNA”, “RNAi agent,” “siRNA agent,” and “RNA interference agent” are used interchangeably herein to refer to a bioactive agent that contains RNA and which mediates the targeted cleavage of an RNA transcript via an RNA-induced silencing complex (RISC) pathway. RNAi agents directs the sequence-specific degradation of mRNA through a process known as RNA interference. The RNAi agent modulates, e.g., inhibits, the expression of a gene in a cell, e.g., a cell within a subject, such as a mammalian subject, such as a human. In some embodiments, the RNAi agent used in the compositions, uses and methods of the disclosure comprises a double-stranded RNA (dsRNA) or duplex of the disclosure and may be referred to herein as a “double-stranded RNAi agent”, a “dsRNAi agent” or a “dsRNA agent”.

[0257] In certain embodiments, a dsRNAi agent of the disclosure includes a double-stranded RNA agent which, when introduced into cells, is processed by the endonuclease known as Dicer into short interfering RNAs. The short interfering RNAs are incorporated into an RISC where one or more helicases unwind the RNA duplex, enabling the complementary antisense strand to guide target recognition. Upon binding to the target mRNA, one or more endonucleases within the RISC cleave the target mRNA to induce silencing. Thus, in other embodiments an siRNA agent relates to a single stranded RNA generated within a cell and which promotes formation of a RISC complex to effect silencing of the target gene. In some such embodiments, the RNAi agent is a single-stranded siRNA (ssRNAi) that can be introduced into a cell or organism to inhibit a target mRNA. Single-stranded RNAi agents bind to the RISC endonuclease, Argonaute 2, which then cleaves the target mRNA. ssRNAi agents are generally 15-30 nucleotides long and may be chemically modified. Any of the antisense oligonucleotides described herein may be used as a ssRNAi agent as described herein. In some embodiments, an ssRNAi agent comprises at least one non-canonical base pairing nucleotide. In some embodiments an ssRNAi agent comprises at least one modified nucleotide.

[0258] The term “double-stranded RNA” or “dsRNA” refers to a complex of ribonucleic acid molecules, having a duplex structure comprising two anti-parallel and substantially complementary nucleic acid strands, referred to as having “sense” and “antisense” orientations with respect to a target RNA. In some embodiments of the disclosure, a double-stranded RNA (dsRNA) triggers the degradation of a target RNA, e.g., an mRNA, e.g., an mRNA for a target gene (e.g., INHBE), through a post-transcriptional gene-silencing mechanism referred to herein as RNA interference or RNAi. In general, the majority of nucleotides of each strand of a dsRNA molecule are ribonucleotides, but as described in detail herein, each or both strands can also include one or more non-ribonucleotides, e.g., a deoxyribonucleotide or a modified nucleotide or a non-canonical nucleotide. Each strand of a dsRNA molecule can range in length from 12-40 nucleotides. For example, each strand can be from 14-40 nucleotides in length, 17-37 nucleotides in length, 25-37 nucleotides in length, 17-25 nucleotides in length, 17-22 in length, 19-25 nucleotides in length, 19-23 nucleotides in length, 19-21 nucleotides in length, 15-23 nucleotides in length, 15-17 nucleotides in length, or 21-23 nucleotides in length, and the length of the sense and antisense strands can be equal or unequal without limitation.

[0259] The term “antisense strand” refers to the strand of an RNAi agent (e.g., a dsRNA, dsRNAi) that includes a region that is substantially complementary to a target sequence (e.g., an INHBE mRNA). As used herein, the term “region of complementarity” refers to a region of the antisense strand that is substantially complementary to a target sequence. Where the region of complementarity is not fully complementary to the target sequence, there may be mismatches in internal or terminal regions of the molecule. Typically, the most tolerated mismatches are found within the terminal region, e.g., within 5, 4, 3 or 2 nucleotides of the 5′- and/or 3′-end of the dsRNA. The length of antisense and sense strands of a dsRNA can be the same or different, as described herein and as known in the art.

[0260] Where a first sequence is referred to as “substantially complementary” with respect to a second sequence, the two sequences can be fully complementary (i.e., complementary over the entire length of one or both nucleotide sequences), or they can form one or more, but generally not more than 5, 4, 3, 2, or 1 mismatched base pairs upon hybridization for a duplex of up to 30 base pairs, while retaining the ability to hybridize under appropriate conditions (e.g., under conditions relevant to their application, e.g., inhibition of gene expression, such as physiological conditions). It should be noted that where two oligonucleotides are designed to form, upon hybridization, one or more single stranded overhangs, such overhangs shall not be regarded as mismatches with regard to the determination of complementarity. For example, a dsRNA comprising one oligonucleotide 21 nucleotides in length and another oligonucleotide 23 nucleotides in length, wherein the longer oligonucleotide comprises a sequence of 21 nucleotides that is fully complementary to the shorter oligonucleotide, can yet be referred to as “fully complementary” for the purposes described herein.

[0261] The term “sense strand” as used herein, refers to the strand of a dsRNA that includes a region that is substantially complementary to a region of the antisense strand.

[0262] As used herein, and unless otherwise indicated, the term “complementary,” when used to describe a first nucleotide sequence in relation to a second nucleotide sequence, refers to the ability of an oligonucleotide or polynucleotide comprising the first nucleotide sequence to hybridize and form a duplex structure under certain conditions with an oligonucleotide or polynucleotide comprising the second nucleotide sequence, as will be understood by the skilled person. Such conditions can, for example, be stringent conditions, where stringent conditions may include: 400 mM NaCl, 40 mM PIPES pH 6.4, 1 mM EDTA, 50° C. or 70° C. for 12-16 hours followed by washing. Other conditions, such as physiologically relevant conditions as may be encountered inside an organism, can apply. For example, a complementary sequence is sufficient to allow the relevant function of the nucleic acid to proceed, e.g., RNAi. The skilled person will be able to determine the set of conditions most appropriate for a test of complementarity of two sequences in accordance with the ultimate application of the hybridized nucleotides.

[0263] The terms “complementary,” “fully complementary” and “substantially complementary” herein can be used with respect to the base pairing between the sense strand and the antisense strand of a dsRNA, or between two oligonucleotides or polynucleotides, such as the antisense strand of a dsRNAi agent and a target sequence, as will be understood from the context of their use.

[0264] The term “melting temperature” or “Tm” is used herein to refer to the temperature at which 50% of the double-stranded RNA (dsRNA) molecules are opened or denatured (i.e., 50% of the double-stranded RNA molecules are separated into single strands, 50% of complementary oligonucleotide strands are not hybridized to each other). For a given oligonucleotide, its corresponding Tm value can be obtained by calculation using any accepted formula or software known in the art. For example and without limitation, Tm can be calculated using the OligoAnalyzer™ tool from Integrated DNA Technologies (IDT) (Coralville, Iowa, USA); using the Tm calculation tool at the website http://insilico.ehu.es/tm.php?formula=basic; and the like. The term “ΔTm” refers to the difference in Tm (e.g., calculated Tm) between two different oligonucleotides (e.g., an unmodified oligonucleotide and an oligonucleotide of the same sequence comprising one or more modified nucleotides). In certain embodiments, ΔTm is used to refer to the difference in melting temperature between two dsRNA regions or duplexes of the disclosure, wherein one of the dsRNA regions or duplexes comprises at least one nucleotide replacement with a modified nucleotide, e.g., a non-canonical base pairing nucleotide. In some embodiments, ΔTm is used to refer to the difference in melting temperature between two oligonucleotides (e.g., two antisense strands, two sense strands), wherein one of the oligonucleotides comprises at least one nucleotide replacement with a non-canonical base pairing nucleotide.

[0265] “G”, “C”, “A”, “T”, and “U” each generally stand for a nucleotide that contains guanine (G), cytosine (C), adenine (A), thymine (also referred to as 5-methyluracil) (T), and uracil (U) as a base, respectively. However, it will be understood that the term “ribonucleotide” or “nucleotide” can also refer to a modified nucleotide, as further detailed below. G, C, A, T and U are referred to herein as “canonical” nucleotides. Canonical nucleotides are defined as shown in Table A. Accordingly, guanine, cytosine, adenine, thymine, and uracil are referred to herein as “canonical” bases. Canonical bases A, U, G, C, and T are the common bases used for RNA or DNA construction. G, C, A, T and U can also be referred to herein as corresponding “canonical” bases when only base groups or base portions are described without causing ambiguity. For canonical bases, in most cases A pairs with U (T in DNA) and G pairs with C, following Watson-Crick base pair rules (referred to herein as “canonical base pairing”).

TABLE A
Definitions of canonical nucleotides.

| Abbreviation | Name |
|---|---|
| A | adenosine-3′-phosphate |
| C | cytidine-3′-phosphate |
| G | guanosine-3′-phosphate |
| U | uridine-3′-phosphate |
| T | 5-methyluridine-3′-phosphate |

[0266] “Non-canonical” base pairing that does not follow Watson-Crick base pair rules is also possible. For example, G-U wobble base pairing occurs commonly and has pairing strength (e.g., thermodynamic stability) comparable to that of a Watson-Crick base pair. Hence, adenine and cytosine anywhere in the nucleotide sequence of a dsRNAi agent of the disclosure can be replaced with guanine and uracil respectively, to form G-U Wobble base pairing with the target sequence.

[0267] Certain modified nucleotides also demonstrate non-canonical base pairing. Such modified nucleotides have different base pairing characteristics than the canonical nucleotides from which they are derived. For example, a modified nucleotide with hypoxanthine as its base (such as inosinic acid) can base pair with nucleotides containing adenine, cytosine, or uracil. Hence, nucleotides containing uracil, guanine, or adenine can be replaced in the nucleotide sequence of a dsRNAi agent of the disclosure by a modified nucleotide containing the base hypoxanthine (e.g., inosinic acid). In certain embodiments, one or more canonical nucleotide in the dsRNAi agent of the disclosure is replaced with a modified nucleotide having different base pairing characteristics; such replacement moieties are referred to herein as “non-canonical base pairing nucleotides”. Non-canonical base pairing nucleotides of the disclosure include both nucleotides capable of non-Watson-Crick or wobble base pairing and/or modified nucleotides with different base pairing characteristics compared to the canonical nucleotides they replace. Sequences containing such non-canonical base pairing nucleotides are suitable for the RNAi agents, compositions and methods of the disclosure.

[0268] It should be understood that non-canonical base pairing nucleotides (e.g., modified nucleotides having different base pairing characteristics than the canonical nucleotides which they replace) may differ not only in the base pairs which they form, but also in the strength or stability of those pairings. Non-canonical base pairing may be stronger or weaker than canonical base pairing. For example, the pairing of m1Ψ (which is modified from U) with A is stronger than the pairing of U with A, and m1Ψ-G pairing is even stronger than m1Ψ-A pairing. Hence by replacing a canonical nucleotide with a non-canonical base pairing nucleotide, it is possible to change the base pairing strength and hence the Tm of an antisense-sense strand duplex and/or of hybridization between an antisense strand and a target RNA (e.g., INHBE mRNA). Thus, in some embodiments, a canonical nucleotide is replaced with a non-canonical base pairing nucleotide, thereby altering the Tm of the oligonucleotide (e.g., altering the calculated Tm of the oligonucleotide, altering the Tm of resulting double-stranded RNA molecules, e.g., duplex of the antisense strand hybridized with the target mRNA and/or the sense strand). Without wishing to be limited by theory, by altering the Tm of an oligonucleotide through replacement of at least one canonical nucleotide with a non-canonical base pairing nucleotide, the efficacy, potency, specificity, safety and/or off-target effects of the dsRNAi agent can be modulated. For example and without limitation, the efficacy or potency of the dsRNAi agent may be increased by increasing pairing strength to the desired target mRNA and/or decreasing pairing to off-target mRNAs. Similarly, undesirable off-target effects may be reduced by increasing pairing strength to the desired target mRNA and/or decreasing pairing strength for off-target mRNAs. Hence in some embodiments, the RNAi agent of the disclosure has improved efficacy, potency, specificity and/or safety compared to similar RNAi agents which do not include at least one non-canonical base pairing nucleotide.

[0269] In certain embodiments of dsRNAi agents, antisense strands, and sense strands of the disclosure, at least one canonical nucleotide is replaced with a non-canonical base pairing nucleotide. In some such embodiments, one nucleotide is replaced with a non-canonical base pairing nucleotide, i.e., the dsRNAi agent, antisense strand, or sense strand comprises one non-canonical base pairing nucleotide. In some embodiments, two, three, four five or more nucleotides are replaced with non-canonical base pairing nucleotides, i.e., the dsRNAi agent, antisense strand, or sense strand comprises two, three, four five or more non-canonical base pairing nucleotides. In some embodiments, 5%, 10%, 15%, 20%, 25%, 30%, 35%, 40%, 45%, 50%, 55%, 60%, 65%, 70%, 75%, 80%, 85%, 90%, 95% or more of the nucleotides in an oligonucleotide or dsRNAi agent are modified nucleotides, e.g., non-canonical base pairing nucleotides. In some embodiments, all of the nucleotides in the dsRNAi agent, e.g., the sense strand and/or the antisense strand, are modified nucleotides, e.g., non-canonical base pairing nucleotides. In some embodiments, at least one nucleotide in the dsRNAi agent, e.g., the sense strand and/or the antisense, is a modified nucleotide, e.g., a non-canonical base pairing nucleotide.

[0270] In certain embodiments, therefore, the RNAi agent of the disclosure comprises at least one non-canonical base pairing nucleotide, i.e., at least one nucleotide in the antisense strand and/or the sense strand is replaced by a non-canonical base pairing nucleotide. In some such embodiments, the at least one non-canonical base pairing nucleotide is present on the antisense strand. In some such embodiments, the at least one non-canonical base pairing nucleotide is present on the sense strand. In some such embodiments, at least one non-canonical base pairing nucleotide is present on both the antisense strand and the sense stand. In some embodiments, the at least one non-canonical base pairing nucleotide is present in the region of complementarity, i.e., the region in an oligonucleotide that is substantially complementary to a target sequence, e.g., the region in an antisense strand of the disclosure complementary to the target mRNA (e.g., INHBE mRNA).

[0271] In certain embodiments, replacement of at least one canonical nucleotide with a non-canonical base pairing nucleotide changes the melting temperature (Tm) of the oligonucleotide or dsRNA duplex. In some embodiments, the Tm is changed by at least 2° C. (i.e., ΔTm is at least about 2° C.). In some embodiments, ΔTm is about 2° C. In some embodiments, ΔTm is over 2° C. In some embodiments, ΔTm is about 2.5° C., 3° C., 3.5° C., 4° C., 4.5° C., or 5° C.

[0272] In certain embodiments, the at least one non-canonical base pairing nucleotide is present at positions 1-11 of the antisense strand, e.g., at position 1, 2, 3, 4, 5, 6, 7, 8, 9, 10, and/or 11, according to the direction from the 5′ end to the 3′ end.

[0273] In certain embodiments, the at least one non-canonical base pairing nucleotide is present at positions 12-21 of the antisense strand, e.g., at position 12, 13, 14, 15, 16, 17, 18, 19, 20, and/or 21, according to the direction from the 5′ end to the 3′ end.

[0274] In certain embodiments of oligonucleotides and dsRNAi agents of the disclosure, according to the direction from the 5′ end to the 3′ end, if at least four (4) of the nucleotides at positions 2-8 of the antisense strand are A or U and at least one (1) of the nucleotides at positions 6-8 is G, then a G at position 6, 7 and/or 8 is replaced with a non-canonical base pairing nucleotide.

[0275] In certain embodiments of oligonucleotides and dsRNAi agents of the disclosure, guanine (G) in the following sequence is replaced with a non-canonical base, e.g., hypoxanthine (I), if at least three (3) bases of N₁, N₂, N₃, and N₄ are adenine (A) or uracil (U), wherein N₁, N₂, N₃, and N₄ are nucleotides independently containing adenine (A), cytosine (C), guanine (G), thymine (T) or uracil (U) as a base, and G₀ is a nucleotide containing guanine as a base: 5′-N₁N₂G₀N₃N₄-3′.

[0276] It should be understood that all non-canonical base pairing nucleosides (or nucleotides) and non-canonical bases disclosed herein or known in the art are suitable for use in RNAi agents, compositions and methods of the disclosure. Non-limiting examples of non-canonical base pairing nucleosides (or nucleotides) or non-canonical bases are defined as shown in Table B. In some embodiments, a non-canonical base pairing nucleoside (or nucleotide) or a non-canonical base is a modified group shown in Table B. In some embodiments, a non-canonical base pairing nucleoside is inosine (I). In some embodiments, a non-canonical base pairing nucleotide is a canonical nucleotide capable of wobble pairing. Combinations of the foregoing are also included.

TABLE B
Examples of non-canonical base pairing
nucleosides (or nucleotides) and non-
canonical bases in accordance with certain embodiments.

| Abbreviation | Name |
|---|---|
| I | hypoxanthine; inosine; inosinic acid |
| X | xanthosine |
| m7G | 7-methylguanosine |
| m6A | N⁶-methyladenosine |
| DHU | dihydrouridine |
| m5C | 5-methylcytidine |
| Ψ | pseudouridine (also known as 5-(β-D- |
| | Ribofuranosyl)pyrimidine-2,4(1H,3H)- |
| | dione or 5-ribosyluracil) |
| m1Ψ | N¹-methylpseudouridine |

[0277] The term “modified nucleotide” is used herein to refer to any nucleotide that independently has a modified sugar moiety, a modified internucleotide linkage and/or a modified nucleobase. Thus, the term “modified nucleotide” encompasses substitution, addition, or removal of, for example, a functional group or atom of an internucleoside linkage, sugar moiety or nucleobase. Modifications suitable for use in RNAi agents of the present disclosure include all types of modifications disclosed herein or known in the art. In some embodiments, a modified nucleotide is a non-canonical base pairing nucleotide as defined herein, i.e., a nucleotide having different pairing characteristics than the canonical nucleotide it replaces. In other embodiments, a modified nucleotide may not have different pairing characteristics but may nevertheless possess characteristics such as stability, resistance to degradation (e.g., resistance to nucleases), manufacturability, and the like, which are desirable or advantageous for the RNAi agents, compositions and methods of the disclosure. In certain embodiments the RNAi agent of the disclosure comprises at least one modified nucleotide in addition to at least one non-canonical base pairing nucleotide, i.e., in addition to including at least one non-canonical base pairing nucleotide, at least one additional nucleotide in the antisense strand and/or the sense strand is replaced by an additional modified nucleotide (which may or may not also be a non-canonical base pairing nucleotide). In some such embodiments, the at least one additional modified nucleotide is present on the antisense strand. In some such embodiments, the at least one additional modified nucleotide is present on the sense strand. In some such embodiments, at least one additional modified nucleotide is present on both the antisense strand and the sense stand. In some such embodiments, the at least one additional modified nucleotide is present on the same strand as the at least one non-canonical base pairing nucleotide. In other embodiments, the at least one additional modified nucleotide is not present on the same strand as the at least one non-canonical base pairing nucleotide, i.e., is present on the other strand. In some embodiments, the at least one additional modified nucleotide is present in the region of complementarity, i.e., the region in an oligonucleotide that is substantially complementary to a target sequence, e.g., the region in an antisense strand of the disclosure complementary to the target mRNA (e.g., INHBE mRNA).

[0278] In the present disclosure, non-limiting examples of common modified nucleotides and related moieties are defined as shown in Table C. In some embodiments, a modified nucleotide is a modified nucleotide shown in Table C. In some embodiments, the at least one additional modified nucleotide in a RNAi agent of the disclosure is a modified nucleotide shown in Table C.

TABLE C
Definitions of modified nucleotides in accordance
with certain embodiments.

| Abbreviation | Name |
|---|---|
| N | any nucleotide |
| N* | thiophosphate-modified nucleotide |
| mN | 2′-O-methyl-modified nucleotide |
| mA* | 2′-O-methyl-adenosine-3′-thiophosphate-phosphate |
| fN | 2′-fluoro-modified nucleotide |
| fA* | 2′-fluoro-adenosine-3′-thiophosphate-phosphate |
| dN | 2′-deoxyribonucleotide |
| VP | 5′-Vinylphosphonate |
| irN | inverted nucleotide |

[0279] As used herein, the modification pattern of inverted nucleotides (also called inverted bases) refers to those bases with linkages reversed from normal 5′ to 3′ linkages (i.e., 5′ to 5′ linkages or 3′ to 3′ linkages).

[0280] In some embodiments, inclusion of a deoxy-nucleotide can be considered to constitute a modified nucleotide.

[0281] It should be understood that all types of modifications disclosed herein or known in the art are suitable for use in RNAi agents, compositions and methods of the disclosure.

[0282] The term “derivative”, as used herein, is understood as being a substance similar in structure to another compound but differing in some slight structural detail.

[0283] The term “inhibiting”, as used herein, is used interchangeably with “reducing,” “silencing”, “downregulating”, “suppressing” and other similar terms, and includes any level of inhibition. As a non-limiting example, “inhibiting” refers to reducing or effectively reducing the onset or progression of a metabolic disorder or related disease in a subject, including a reduction in one or more aspects of the disease (such as symptoms, tissue characteristics, cell activity, inflammatory activity, or immune activity, etc.), or with no detectable deterioration in symptoms in the subject.

[0284] As used herein, the phrase “inhibiting expression of a gene” (e.g., “inhibiting INHBE”) refers to inhibiting the expression of RNA transcripts (e.g., INHBE mRNA) encoded by said gene compared to an appropriate reference (e.g., reference cell, cell population, sample or subject) and/or to reducing the level of RNA transcripts (e.g., INHBE mRNA)(e.g., by degradation) and/or to reducing the amount, level and/or activity of the gene products (e.g., RNAs, proteins) in a cell, cell population, sample or subject. The phrase “inhibiting INHBE expression” thus refers to a reduction of the amount or level or activity of INHBE mRNA and/or INHBE protein in a cell, cell population, sample or subject compared to an appropriate reference (e.g. a reference cell, cell population, sample or subject), such as an inhibition by at least about 5%, at least about 10%, at least about 15%, at least about 20%, at least about 25%, at least about 30%, at least about 35%, at least about 40%, at least about 45%, at least about 50%, at least about 55%, at least about 60%, at least about 65%, at least about 70%, at least about 75%, at least about 80%, at least about 85%, at least about 90%, at least about 91%, at least About 92%, at least about 93%, at least about 94%, at least about 95%, at least about 96%, at least about 97%, at least about 98%, or at least about 99%, compared to the appropriate reference.

[0285] As used herein, the phrase “contacting a cell with an RNAi agent,” such as a dsRNAi agent, includes contacting a cell by any possible means. Contacting a cell with an RNAi agent includes contacting a cell in vitro with the or contacting a cell in vivo with the RNAi agent. The contacting may be done directly or indirectly. Thus, for example, the RNAi agent may be put into physical contact with the cell, or alternatively, the RNAi agent may be put into a situation that will permit or cause it to subsequently come into contact with the cell. Contacting a cell in vitro may be done, for example, by incubating the cell with the RNAi agent. Contacting a cell in vivo may be done, for example, by injecting the RNAi agent into or near the tissue where the cell is located, or by injecting the RNAi agent into another area, e.g., the bloodstream or the subcutaneous space, such that the agent will subsequently reach the tissue where the cell to be contacted is located. For example, the RNAi agent may contain or be coupled to a targeting ligand, e.g., GalNAc, that directs the RNAi agent to a site of interest, e.g., the liver. In other embodiments, the RNAi agent may contain or be coupled to one or more C22 hydrocarbon chains and one or more GalNAc derivatives. In other embodiments, the RNAi agent contains or is coupled to one or more C22 hydrocarbon chains and does not contain or is not coupled to one or more GalNAc derivatives. Combinations of in vitro and in vivo methods of contacting are also possible. For example, a cell may also be contacted in vitro with an RNAi agent of the disclosure and subsequently transplanted into a subject. In certain embodiments, contacting a cell with an RNAi agent includes facilitating or effecting uptake or absorption into the cell. Absorption or uptake of an RNAi agent can occur through unaided diffusion or active cellular processes, or by auxiliary agents or devices. Introducing an RNAi agent into a cell may be in vitro or in vivo. For example, for in vivo introduction, an RNAi agent can be injected into a tissue site or administered systemically. In vitro introduction into a cell includes methods known in the art such as electroporation and lipofection.

[0286] The term “subject” includes animals, including mammals and humans, particularly humans. Non-limiting examples of subjects include humans, monkeys, cows, rabbits, sheep, goats, pigs, dogs, cats, rats, mice, and transgenic species thereof. As used herein, the term “cyno” or “cynomolgus monkey” refers to cynomolgus monkeys. In certain embodiments, the subject is a human.

[0287] “Treating” or “treatment” of any disease or disorder refers, in some embodiments, to ameliorating at least one disease or disorder. In certain embodiments “treating” or “treatment” refers to ameliorating at least one physical parameter, which may or may not be discernible by the patient. In certain embodiments, “treating” or “treatment” refers to inhibiting the disease or disorder, either physically (e.g., stabilization of a discernible symptom), physiologically (e.g., stabilization of a physical parameter), or both. In some embodiments, “treating” or “treatment” refers to improving the quality of life or reducing the symptoms or side effects of a disease in a subject in need thereof “Therapeutically effective amount” means the amount of a dsRNA or a dsRNAi agent that, when administered to a subject for treating or preventing a disease, is sufficient to effect such treatment or prevention of the disease. The “therapeutically effective amount” will vary depending on the compound or RNAi agent, the disease and its severity, and the age, weight, etc., of the subject having the disease to be treated or prevented. As used herein, the term “therapeutically effective amount” refers to an amount of a compound or composition sufficient to prevent, treat, inhibit, reduce, ameliorate or eliminate one or more causes, symptoms, or complications of a disease or disorder such as, for example, metabolic syndrome. The terms “effective amount” and “therapeutically effective amount” are used interchangeably herein.

[0288] “Preventing” or “prevention” or “prophylaxis” of any disease or disorder refers, in some embodiments, to at least the reduction of likelihood of the risk of (or susceptibility to) acquiring a disease or disorder (i.e., causing at least one of the clinical symptoms of the disease not to develop in a patient that may be exposed to or predisposed to the disease but does not yet experience or display symptoms of the disease).

[0289] The phrase “pharmaceutically acceptable” as used herein refers to those compounds, materials, compositions, or dosage forms which are, within the scope of sound medical judgment, suitable for use in contact with the tissues of human subjects and animal subjects without excessive toxicity, irritation, allergic response, or other problem or complication, commensurate with a reasonable benefit/risk ratio.

[0290] The phrase “pharmaceutically acceptable carrier” as used herein refers to a pharmaceutically acceptable material, composition or vehicle, such as a liquid or solid filler, diluent, excipient, manufacturing auxiliary (such as a lubricating talc, magnesium stearate, calcium or zinc stearate, or stearic acid), or solvent-encapsulating materials (involved in carrying or transporting the compound or dsRNAi agent from one organ or part of the body to another).

### RNA Interference

[0291] The present disclosure provides a small interfering RNA (siRNA or RNAi) agent that inhibits the expression of the target gene INHBE in a cell via an RNA interference (RNAi) process. In some embodiments, the RNAi agent comprises a double-stranded ribonucleic acid (dsRNA) molecule for inhibiting expression of the INHBE gene in a cell (e.g., an adipocyte and/or a liver cell, e.g., a hepatocyte). An siRNA or RNAi agent comprising a dsRNA molecule is also referred to herein as a “dsRNAi” agent. In certain embodiments the cell is found within a subject. In some embodiments the subject is a mammal, e.g., a human. In some embodiments the subject has, suffers from, or is predisposed to a metabolic disorder (e.g., metabolic syndrome), a carbohydrate disorder (e.g., type 2 diabetes, pre-diabetes), a lipid metabolism disorder (e.g., hyperlipidemia, hypertension, lipodystrophy), kidney disease, cardiovascular disease, and/or a weight disorder (e.g., obesity, overweight). The dsRNAi agent of the disclosure includes an antisense strand having a region of complementarity to at least a portion of an mRNA formed in the expression of INHBE. In some embodiments the complementary region is from about 19-30 nucleotides in length (e.g., about 30, 29, 28, 27, 26, 25, 24, 23, 22, 21, 20, or 19 nucleotides in length). In some embodiments the complementary region is from about 15-30 nucleotides in length (e.g., about 30, 29, 28, 27, 26, 25, 24, 23, 22, 21, 20, 19, 18, 17, 16, or 15 nucleotides in length). In some embodiments the complementary region comprises at least 15 contiguous nucleotides. In certain embodiments, the dsRNAi agent comprises at least one modified nucleotide, as described herein. In certain embodiments, the dsRNAi agent comprises at least on non-canonical base pairing nucleotide, as described herein.

[0292] In accordance with methods of the disclosure, cells expressing the target gene are contacted with the siRNA agent which inhibits expression of the target gene (e.g., human, primate, non-primate, or mouse INHBE gene). In some embodiments, expression of the target gene is inhibited by at least about 50%. Inhibition of expression of the target gene may be determined using any suitable method, for example and without limitation, by PCR or branched DNA (bDNA) methods, or by protein methods, e.g., by immunofluorescence analysis, using e.g., Western blot or flow cytometry techniques. In some embodiments, inhibition of expression is determined by the rt-PCR method (e.g., as described in the Examples hereinbelow, using, for example, siRNA at a concentration of 10 nM in a cell line of a suitable organism). In some embodiments, inhibition of expression in vivo is determined using an animal model, e.g., by knockdown of the human gene in a rodent expressing the human gene (e.g., a mouse expressing the human INHBE gene). In some such embodiments the siRNA is administered to the subject (e.g., the animal model) as a single dose, e.g., in a single dose at 3 mg/kg, 6 mg/kg, or 9 mg/kg).

[0293] A dsRNA includes two RNA strands that are complementary and hybridize to form a duplex structure under conditions in which the dsRNA will be used (e.g., under physiological conditions). One strand of the dsRNA (the antisense strand) includes a region of complementarity that is substantially, and in some embodiments fully, complementary to a target sequence. Target sequences can be derived from the sequence of an mRNA formed during the expression of an INHBE. The other strand (the sense strand) includes a region that is complementary to the antisense strand such that when the two strands are combined under appropriate conditions, they will hybridize and form a duplex structure. As described elsewhere herein and known in the art, the complementary sequence of the dsRNA can also be included as a self-complementary region of a single nucleic acid molecule rather than on separate oligonucleotides. Generally, the duplex structure is from 15 to 30 base pairs in length, such as without limitation 15-29, 15-28, 15-27, 15-26, 15-25, 15-24, 15-23, 15-22, 15-21, 15-20, 15-19, 15-18, 15-17, 17-25, 18-30, 18-29, 18-28, 18-27, 18-26, 18-25, 18-24, 18-23, 18-22, 18-21, 18-20, 19-30, 19-29, 19-28, 19-27, 19-26, 19-25, 19-24, 19-23, 19-22, 19-21, 19-20, 20-30, 20-29, 20-28, 20-27, 20-26, 20-25, 20-24, 20-23, 20-22, 20-21, 21-30, 21-29, 21-28, 21-27, 21-26, 21-25, 21-24, 21-23, or 21-22 base pairs in length. In certain embodiments, the length of the duplex structure is 17 to 25 base pairs, such as without limitation 17-23, 17-25, 18-25, 18-24, 18-23, 18-22, 18-21, 18-20, 19-25, 19-24, 19-23, 19-22, 19-21, 19-20, 20-25, 20-24, 20-23, 20-22, 20-21, 21-25, 21-24, 21-23, 21-22, 22-25, 22-24, 22-23, 23-25, 23-24 or 24-25 base pairs in length, e.g., 19-21 base pairs in length. Ranges and lengths intermediate to the above ranges and lengths are also considered to be part of the disclosure.

[0294] Similarly, the region of complementarity to the target sequence is 15 to 30 nucleotides in length, e.g., 15-29, 15-28, 15-27, 15-26, 15-25, 15-24, 15-23, 15-22, 15-21, 15-20, 15-19, 15-18, 15-17, 18-30, 18-29, 18-28, 18-27, 18-26, 18-25, 18-24, 18-23, 18-22, 18-21, 18-20, 19-30, 19-29, 19-28, 19-27, 19-26, 19-25, 19-24, 19-23, 19-22, 19-21, 19-20, 20-30, 20-29, 20-28, 20-27, 20-26, 20-25, 20-24,20-23, 20-22, 20-21, 21-30, 21-29, 21-28, 21-27, 21-26, 21-25, 21-24, 21-23, or 21-22 nucleotides in length, for example 19-23 nucleotides in length or 21-23 nucleotides in length. Ranges and lengths intermediate to the above recited ranges and lengths are also contemplated to be part of the disclosure.

[0295] In some embodiments, the duplex structure is 19 to 30 base pairs in length. Similarly, the region of complementarity to the target sequence is 19 to 30 nucleotides in length.

[0296] In some embodiments, the duplex structure is 15 to 23 base pairs in length. Similarly, the region of complementarity to the target sequence is 15 to 23 nucleotides in length.

[0297] In some embodiments, the dsRNA is about 19 to about 23 nucleotides in length, or about 25 to about 30 nucleotides in length. In some embodiments, the dsRNA is about 15 to about 23 nucleotides in length, or about 17 to about 23 nucleotides in length, or about 17 to about 25 nucleotides in length, or about 19 to about 21 nucleotides in length.

[0298] The duplex region is a primary functional portion of a dsRNA, e.g., a duplex region of about 15 to about 30 base pairs, or about 17 to about 30 base pairs, or about 19 to about 30 base pairs, e.g., about 15-23, 15-25, 17-25, 17-23, 19-30, 19-29, 19-28, 19-27, 19-26, 19-25, 19-24, 19-23, 19-22, 19-21, 19-20, 20-30, 20-29, 20-28, 20-27, 20-26, 20-25, 20-24,20-23, 20-22, 20-21, 21-30, 21-29, 21-28, 21-27, 21-26, 21-25, 21-24, 21-23, or 21-22 base pairs. Thus, in one embodiment, to the extent that it becomes processed to a functional duplex, of e.g., 15-30 base pairs or at least 15 base pairs, that targets a desired RNA for cleavage, an RNA molecule or complex of RNA molecules having a duplex region greater than 30 base pairs is a dsRNA. In another embodiment, a dsRNA is not a naturally occurring miRNA. In another embodiment, an siRNA agent useful to target INHBE gene expression is not generated in the target cell by cleavage of a larger dsRNA.

[0299] A dsRNA as described herein can further include one or more single-stranded nucleotide overhangs, e.g., 1-4, 2-4, 1-3, 2-3, 1, 2, 3, or 4 nucleotides. dsRNAs having at least one nucleotide overhang can have superior inhibitory properties relative to their blunt-ended counterparts. A nucleotide overhang can comprise or consist of a nucleotide/nucleoside analog, including a deoxynucleotide/nucleoside. The overhang(s) can be on the sense strand, the antisense strand, or any combination thereof. Furthermore, the nucleotide(s) of an overhang can be present on the 5′-end, the 3′-end, or both ends of an antisense or sense strand of a dsRNA.

[0300] “Blunt” or “blunt end” means that there are no unpaired nucleotides at the end of the dsRNA, i.e., no nucleotide overhang. A “blunt ended” dsRNA is double-stranded over its entire length, i.e., no nucleotide overhang at either end of the molecule. The dsRNAi agents of the disclosure include dsRNAs with no nucleotide overhang at one end (i.e., agents with one overhang and one blunt end) or with no nucleotide overhangs at either end. In some embodiments such oligonucleotides are double-stranded over their entire length.

[0301] A dsRNA can be synthesized by standard methods known in the art. Double-stranded RNAi compounds of the invention can be prepared using a two-step procedure. First, each strand of a double-stranded RNA molecule is prepared separately and then annealed. Individual strands of siRNA compounds can be prepared using solution phase or solid phase organic synthesis or both. An advantage of organic synthesis is that oligonucleotide chains comprising non-natural or modified nucleotides can be readily prepared. Similarly, single-stranded oligonucleotides of the technology can be prepared using solution-phase or solid-phase organic synthesis, or both.

[0302] In an aspect, a dsRNA of the disclosure includes at least two nucleotide sequences, a sense sequence and an antisense sequence. In some embodiments, the sense strand is selected from the group of sequences provided in any one of Tables 1 and 2, and the corresponding antisense strand of the sense strand is selected from the group of sequences in any one of Tables 1 and 2. In this aspect, one of the two sequences is complementary to the other of the two sequences, with one of the sequences being substantially complementary to a sequence of an mRNA generated in the expression of a target gene. As such, in this aspect, a dsRNA will include two oligonucleotides, where one oligonucleotide is described as the sense strand in any one of Tables 1 and 2, and the second oligonucleotide is described as the corresponding antisense strand of the sense strand in any one of Tables 1 and 2.

[0303] In some embodiments, the sense and/or antisense strand is selected from the sense and/or antisense strand of any one of duplexes IN-043, IN-091, IN-106, IN-176, IN-189, IN-202, or IN-221.

[0304] It can be understood that although the sequences in Table 1 are un-modified or un-conjugated sequences, the RNA of the siRNA of the disclosure, e.g., a dsRNA of the disclosure, may comprise any one of the sequences set forth in any one of Tables 1 and 2 that is un-modified, un-conjugated, or modified or conjugated differently than described therein. In other words, the disclosure encompasses dsRNA of Tables 1 and 2 which are un-modified, un-conjugated, modified, or conjugated, as described herein.

[0305] The skilled person understands dsRNAs having a duplex structure of about 20 to 23 base pairs, e.g., 21, base pairs have been hailed as particularly effective in inducing RNA interference (Elbashir et al., EMBO 2001, 20:6877-6888). However, others have found that shorter or longer RNA duplex structures can also be effective (Chu and Rana (2007) RNA 14:1714-1719; Kim et al. (2005) Nat Biotech 23:222-226). In some embodiments, the dsRNA described herein can include at least one strand of a length of minimally 21 nucleotides. It can be reasonably expected that shorter duplexes having any one of the sequences in any one of Tables 1 and 2 minus only a few nucleotides on one or both ends can be similarly effective as compared to the dsRNAs described above. Hence, dsRNAs having a sequence of at least 12, 13, 14, 15, 19, 20, or more contiguous nucleotides derived from any one of the sequences of any one of Tables 1 and 2, and differing in their ability to inhibit the expression of an INHBE gene by not more than about 5, 10, 15, 20, 25, or 30% inhibition from a dsRNA comprising the full sequence, are contemplated to be within the scope of the present disclosure.

### Modifications for the RNAi Agent

[0306] In some embodiments, the RNA of the dsRNAi agent of the disclosure is un-modified, and does not comprise, e.g., chemical modifications or conjugations as known in the art and described herein. In other embodiments, the RNA of an dsRNAi agent of the disclosure, e.g., a dsRNA, is chemically modified to enhance stability or to provide other beneficial characteristics. In some embodiments, substantially all the nucleotides of an RNA of the invention are modified. In other embodiments, all the nucleotides of an RNA or substantially all the nucleotides of an RNA are modified. In some embodiments, not more than 5, 4, 3, 2, or 1 unmodified nucleotides are present in a strand of RNA of the disclosure, e.g., oligonucleotide, antisense strand, sense strand, or dsRNA.

[0307] In some embodiments, the dsRNAi agents comprise at least one nucleic acid modification described herein. For example, the dsRNAi agents may comprise at least one modification selected from the group consisting of modified internucleoside linkage, modified nucleobase, modified sugar, and any combinations thereof. Without limitations, such a modification can be present anywhere in the dsRNAi agent of the disclosure. In certain embodiments, the dsRNAi agents comprise at least one non-canonical base pairing nucleotide. Without limitations, such nucleotides can be present anywhere in the dsRNAi agent of the disclosure. In some embodiments, the at least one modified nucleotide and/or non-canonical base pairing nucleotide changes the melting temperature of the oligonucleotide, e.g., ΔTm is at least 2° C., e.g., about 2° C., over 2° C., about 2-5° C., about 3° C., about 4° C., or about 5° C.

[0308] In one embodiment, the dsRNAi agents of the disclosure comprise one or more targeting ligands, e.g., one or more GalNAc derivatives, and comprise at least one additional nucleic acid modification described herein. For example, the dsRNAi agents may comprise at least one modification selected from the group consisting of modified internucleoside linkage, modified nucleobase, modified sugar, and any combinations thereof. Without limitations, such a modification can be present anywhere in the dsRNAi agent of the disclosure. For example, the modification can be present in one of the RNA molecules. Modifications include, for example and without limitation, end modifications, e.g., 5′-end modifications (phosphorylation, conjugation, inverted linkages) or 3′-end modifications (conjugation, DNA nucleotides, inverted linkages, etc.); base modifications, e.g., replacement with stabilizing bases, destabilizing bases, or bases that base pair with an expanded repertoire of partners, removal of bases (abasic nucleotides), or conjugated bases; sugar modifications (e.g., at the 2′-position or 4′-position) or replacement of the sugar; or backbone modifications, including modification or replacement of the phosphodiester linkages. Specific examples of RNAi agents useful in the embodiments described herein include, but are not limited to, RNAs containing modified backbones or no natural internucleoside linkages. RNAs having modified backbones include, among others, those that do not have a phosphorus atom in the backbone. In some embodiments, a modified RNAi agent will have a phosphorus atom in its internucleoside backbone.

[0309] In some embodiments, backbone modifications refer to internucleoside linkages or backbones including, but not limited to, phosphorothioate moiety, chiral phosphorothioate, phosphorothioate, phosphorodithioate, phosphotriester, aminoalkyl-phosphotriester, chiral phosphonate, phosphinate, phosphoramidate, thioalkylphosphonate, thioalkylphosphotriester, and morpholino link, wherein the adjacent nucleoside unit pairs are linked 3′-5′ to 5′-3′ or 2′-5′ to 5′-2′.

[0310] In some embodiments, the sense strand of a dsRNA may contain 1, 2, 3, 4, 5, or 6 phosphorothioate linkages (phosphorothioate-modified nucleotides), and the antisense strand of a dsRNA may contain 1, 2, 3, 4, 5 or 6 phosphorothioate linkages (phosphorothioate modified nucleotides). In some embodiments, the sense strand of a dsRNA can contain 1 or 2 phosphorothioate linkages, and the antisense strand of an siRNA can contain 1, 2, 3, or 4 phosphorothioate linkages.

[0311] In some embodiments, the sense strand of the dsRNA contains 2 phosphorothioate internucleoside linkages. In some embodiments, the phosphorothioate internucleoside linkage is located between nucleotides at position 1-3 from the 5′ end of the sense strand. In some embodiments, the phosphorothioate internucleoside linkage is located between nucleotides at position 1-3 from the 3′ end of the sense strand. In some embodiments, one phosphorothioate internucleoside linkage is at the 5′ end of the sense strand, and another phosphorothioate linkage is at the 3′ end of the sense strand. In some embodiments, the sense strand of the dsRNAi contains 1 phosphorothioate internucleoside linkage. In some embodiments, the phosphorothioate internucleoside linkage is located between nucleotides at position 1-2 from the 5′ end of the sense strand. In some embodiments, the phosphorothioate internucleoside linkage is located between nucleotides at position 2-3 from the 5′ end of the sense strand. In some embodiments, the targeting ligand is attached to the sense strand via a phosphorothioate linkage.

[0312] In some embodiments, the antisense strand of the dsRNA contains 4 phosphorothioate internucleoside linkages. In some embodiments, the four phosphorothioate internucleoside linkages are located between the nucleotides at position 1-3 from the 5′ end of the antisense strand and at position 1-3 from the 3′ end of the antisense strand. In some embodiments, the antisense strand of the dsRNA contains 3 phosphorothioate internucleoside linkages. In some embodiments, the three phosphorothioate internucleoside linkages are located between nucleotides at position 1-2 from the 5′ end of the antisense strand and at position 1-3 from the 3′ end of the antisense strand. In some embodiments, the three phosphorothioate internucleoside linkages are located between nucleotides at position 1-3 from the 5′ end of the antisense strand and at position 1-2 positions from the 3′ end of the antisense strand. In some embodiments, the antisense strand of the dsRNA contains 2 phosphorothioate internucleoside linkages. In some embodiments, the two phosphorothioate internucleoside linkages are located between the nucleotides at position 1-2 from the 5′ end of the antisense strand and at position 1-2 from the 3′ end of the antisense strand.

[0313] In some embodiments, the antisense strand of the dsRNA comprises the nucleotide (from 5′ end→3′ end) sequence of any one of the antisense strand sequences in Table 1 or 2. In some embodiments, the sense strand of the dsRNA comprises the nucleotide (from 5′ end→3′ end) sequence of any one of the sense strand sequences in Table 1 or 2. In some embodiments, the antisense strand of the dsRNA comprises the nucleotide (from 5′ end→3′ end) sequence of any one of the antisense strands in Tables 1 or 2, and the sense strand comprises the nucleotide (from 5′ end→3′ end) sequence of any one of the sense strands in Tables 1 or 2.

[0314] In some embodiments, the modified nucleotide is selected from: 2′-O-methyl-modified nucleotide, 2′-fluoro-modified nucleotide, 2′-deoxy nucleotide, 2′-methoxyethyl-modified nucleotide, 2′-amino-modified nucleotide, 2′-alkyl-modified nucleotide, 2′-alkoxy-modified nucleotide, 2′-F-arabino nucleotide, phosphorothioate-modified nucleotides, abasic nucleotides, morpholino nucleotide, locked nucleotide, inverted nucleotide, and hypoxanthin base-substituted nucleotide (i.e., inosine).

[0315] In some embodiments, the modified nucleotide is selected from: 2′-O-methyl-modified nucleotide, 2′-fluoro-modified nucleotide, 2′-deoxy nucleotide, phosphorothioate-modified nucleotide, and inverted base nucleotide (reverse linkage). In some embodiments, the inverted base nucleotide is selected from: inverted A nucleotide, inverted dA nucleotide, inverted dT nucleotide, inverted C nucleotide and inverted U nucleotide.

[0316] Exemplary modified nucleotides or nucleobases include, but are not limited to: synthetic and natural nucleosides or nucleobases such as inosine, xanthine, hypoxanthine, nebularine, isoguanisine, tubercidine, 2-(halo)adenine, 2-(alkyl)adenine, 2-(propyl)adenine, 2-(amino)adenine, 2-(aminoalkyll)adenine, 2-(aminopropyl)adenine, 2-(methylthio)-N6-(isopentenyl)adenine, 6-(alkyl)adenine, 6-(methyl)adenine, 7-(deaza)adenine, 8-(alkenyl)adenine, 8-(alkyl)adenine, 8-(alkynyl)adenine, 8-(amino)adenine, 8-(halo)adenine, 8-(hydroxyl)adenine, 8-(thioalkyl)adenine, 8-(thiol)adenine, N6-(isopentyl)adenine, N6-(methyl)adenine, N6, N6-(dimethyl)adenine, 2-(alkyl)guanine,2-(propyl)guanine, 6-(alkyl)guanine, 6-(methyl)guanine, 7-(alkyl)guanine,7-(methyl)guanine, 7-(deaza)guanine, 8-(alkyl)guanine, 8-(alkenyl)guanine, 8-(alkynyl)guanine, 8-(amino)guanine, 8-(halo)guanine, 8-(hydroxyl)guanine, 8-(thioalkyl)guanine, 8-(thiol)guanine, N-(methyl)guanine, 2-(thio)cytosine, 3-(deaza)-5-(aza)cytosine, 3-(alkyl)cytosine, 3-(methyl)cytosine, 5-(alkyl)cytosine, 5-(alkynyl)cytosine, 5-(halo)cytosine, 5-(methyl)cytosine, 5-(propenyl)cytosine, 5-(propynyl)cytosine, 5-(trifluoromethyl)cytosine, 6-(azo)cytosine, N4-(acetyl)cytosine, 3-(3-amino-3-carboxypropyl)uracil, 2-(thio)uracil, 5-(methyl)-2-(thio)uracil, 5-(methylaminomethyl)-2-(thio)uracil, 4-(thio)uracil, 5-(methyl)-4-(thio)uracil, 5-(methylaminomethyl)-4-(thio)uracil, 5-(methyl)-2,4-(dithio)uracil, 5-(methylaminomethyl)-2,4-(dithio)uracil, 5-(2-aminopropyl)uracil, 5-(alkyl)uracil, 5-(alkynyl)uracil, 5-(allylamino)uracil, 5-(aminoallyl)uracil, 5-(aminoalkyl)uracil, 5-(guanidiniumalkyl)uracil, 5-(1,3-diazole-1-alkyl)uracil, 5-(cyanoalkyl)uracil, 5-(dialkylaminoalkyl)uracil, 5-(dimethylaminoalkyl)uracil, 5-(halo)uracil, 5-(methoxy)uracil, uracil-5-oxyacetic acid, 5-(methoxycarbonylmethyl)-2-(thio)uracil, 5-(methoxycarbonyl-methyl)uracil, 5-(propenyl))uracil, 5-(propynyl)uracil, 5-(trifluoromethyl)uracil, 6-(azo)uracil, dihydrouracil, N3-(methyl)uracil, 5-uracil (i.e., pseudo uracil), 2-(thio)pseudouracil,4-(thio)pseudouracil,2,4-(dithio)psuedouracil,5-(alkyl)pseudouracil, 5-(methyl)pseudouracil, 5-(alkyl)-2-(thio)pseudouracil, 5-(methyl)-2-(thio)pseudouracil, 5-(alkyl)-4-(thio)pseudouracil, 5-(methyl)-4-(thio)pseudouracil, 5-(alkyl)-2,4-(dithio)pseudouracil, 5-(methyl)-2,4-(dithio)pseudouracil, I-substituted pseudouracil, I-substituted 2(thio)-pseudo uracil, I-substituted 4-(thio)pseudo uracil, I-substituted 2,4-(dithio)pseudouracil, 1-(aminocarbonylethylenyl)-pseudouracil, 1-(aminocarbonylethylenyl)-2(thio)pseudouracil, 1-(aminocarbonylethylenyl)-4-(thio)pseudo uracil, 1-(aminocarbonylethylenyl)-2,4-(dithio)pseudouracil, 1-(aminoalkylaminocarbonylethylenyl)-pseudouracil, 1-(aminoalkylaminocarbonylethylenyl)-2(thio)-pseudouracil, 1-(aminoalkylaminocarbonylethylenyl)-4-(thio)pseudo uracil, 1-(aminoalkylaminocarbonylethylenyl)-2,4-(dithio)pseudouracil, 1,3-(diaza)-2-(oxo)-phenoxazin-1-yl, 1-(aza)-2-(thio)-3-(aza)-phenoxazin-1-yl, 1,3-(diaza)-2-(oxo)-phenthiazin-1-yl, 1-(aza)-2-(thio)-3-(aza)-phenthiazin-1-yl, 7-substituted 1,3-(diaza)-2-(oxo)-phenoxazin-1-yl, 7-substituted 1-(aza)-2-(thio)-3-(aza)-phenoxazin-1-yl, 7-substituted 1,3-(diaza)-2-(oxo)-phenthiazin-1-yl, 7-substituted 1(aza)-2-(thio)-3-(aza)-phenthiazin-1-yl, 7-(aminoalkylhydroxy)-1,3-(diaza)-2-(oxo)-phenoxazin-1-yl, 7-(aminoalkylhydroxy)-1-(aza)-2-(thio)-3-(aza)-phenoxazin-1-yl, 7-(aminoalkylhydroxy)-1,3-(diaza)-2-(oxo)-phenthiazin-1-yl, 7-(aminoalkylhydroxy)-1-(aza)-2-(thio)-3-(aza)-phenthiazin-1-yl, 7-(guanidiniumalkylhydroxy)-1,3-(diaza)-2-(oxo)-phenoxazin-1-yl, 7-(guanidiniumalkylhydroxy)-1-(aza)-2-(thio)-3-(aza)-phenoxazin-1-yl, 7-(guanidiniumalkyl-hydroxy)-1,3-(diaza)-2-(oxo)phenthiazin-1-yl, 7-(guanidiniumalkylhydroxy)-1-(aza)-2-(thio)-3-(aza)-phenthiazin-1-yl, 1,3,5-(triaza)-2,6-(dioxa)-naphthalene, inosinyl, 2-aza-inosinyl, 7-deaza-inosinyl, nitroimidazolyl, nitropyrazolyl, nitrobenzimidazolyl, nitroindazolyl, aminoindolyl, pyrrolopyrimidinyl, 3-(methyl)isocarbostyrilyl, 5-(methyl)isocarbostyrilyl, 3-(methyl)-7-(propynyl)isocarbostyrilyl, 7-(aza)indolyl, 6-(methyl)-7-(aza)indolyl, imidizopyridinyl, 9-(methyl)-imidizopyridinyl, pyrrolopyrizinyl, isocarbostyrilyl, 7-(propynyl)isocarbostyrilyl, propynyl-7-(aza)indolyl, 2,4,5-(trimethyl)phenyl, 4-(methyl)indolyl, 4,6-(dimethyl)indolyl, phenyl, napthalenyl, anthracenyl, phenanthracenyl, pyrenyl, stilbenyl, tetracenyl, pentacenyl, difluorotolyl, 4-(fluoro)-6-(methyl)benzimidazole, 4-(methyl)benzimidazole, 6-(azo)thymine, 2-pyridinone, 5-nitroindole, 3-nitropyrrole, 6-(aza)pyrimidine, 2-(amino)purine, 2,6-(diamino)purine, 5-substituted pyrimidines, N2-substituted purines, N6-substituted purines, 06-substituted purines, substituted 1,2,4-triazoles, pyrrolo-pyrimidin-2-on-3-yl, 6-phenyl-pyrrolopyrimidin-2-on-3-yl, para-substituted-6-phenyl-pyrrolo-pyrimidin-2-on-3-yl, ortho-substituted-6-phenyl-pyrrolo-pyrimidin-2-on-3-yl, bis-ortho-substituted-6-phenyl-pyrrolo-pyrimidin-2-on-3-yl, para-(aminoalkylhydroxy)-6-phenyl-pyrrolo-pyrimidin-2-on-3-yl, ortho-(aminoalkylhydroxy)-6-phenyl-pyrrolo-pyrimidin-2-on-3-yl, bis-ortho-(aminoalkylhydroxy)-6-phenyl-pyrrolo-pyrimidin-2-on-3-yl, pyridopyrimidin-3-yl, 2-oxo-7-amino-pyridopyrimidin-3-yl, 2-oxo-pyridopyrimidine-3-yl, or any O-alkylated or N-alkylated derivatives thereof. Alternatively, substituted or modified analogs of any of the above nucleotides or nucleobases can be used in RNAi agents, compositions, and methods of the disclosure.

[0317] In some embodiments, the modified nucleotide and/or non-canonical base pairing nucleotide includes any one or combination of the following:
[0318] (1) According to the direction from the 5′ end to the 3′ end, the nucleotides at positions 2, 4, 12, and 14 of the antisense strand are 2′-fluoro-modified nucleotides, and the nucleotides at the remaining positions are 2′-O-methyl-modified nucleotides;
[0319] (2) According to the direction from the 5′ end to the 3′ end, the nucleotides at positions 7, 8, and 9 of the sense strand are 2′-fluoro-modified nucleotides;
[0320] (3) According to the direction from the 5′ end to the 3′ end, G at positions 2-8 of the antisense strand is replaced by inosine (I).

[0321] In some such embodiments, the modified nucleotide for the base replacement of hypoxanthine at positions 2-8 of the antisense strand further meets any one or combination of the following characteristics:
[0322] (i) According to the direction from the 5′ end to the 3′ end, guanine at positions 6-8 of the antisense strand is replaced by hypoxanthine (I);
[0323] (ii) According to the direction from the 5′ end to the 3′ end, guanine in G₀ in the sequence N₁N₂G₀N₃N₄ of the antisense strand is replaced by hypoxanthine (I) if at least 3 bases of N₁, N₂, N₃ and N₄ are A or U, where N₁, N₂, N₃, and N₄ are nucleotides independently containing adenine (A), cytosine (C), guanine (G), thymine (T) or uracil (U) as a base, and G₀ is a nucleotide containing guanine as a base;
[0324] (iii) According to the direction from the 5′ end to the 3′ end, the total number of adenine (A) and uracil (U) at positions 2-8 of the antisense strand is no less than 4; and/or
[0325] (iv) at least one guanine in G nucleotide in the antisense strand is replaced by hypoxanthine (I), wherein the hypoxanthine replacement causes a difference in melting temperature (ΔTm) of at least 2° C., of 2° C., or of over 2° C., for a dsRNA comprising the antisense strand with hypoxanthine replacement compared to the same dsRNA where the guanine (G) has not been replaced by hypoxanthine (I).

[0326] In some embodiments, the dsRNAi agents further comprise a phosphate or phosphate mimic at the 5′-end of the antisense strand. In some embodiments, the phosphate mimic is a 5′-vinyl phosphonate (VP). In some embodiments, the 5′-end of the antisense strand of the dsRNAi agent does not contain a 5′-vinyl phosphonate (VP).

[0327] Ends of the RNAi agents of the disclosure can be modified. Such modifications can be at one end or both ends. For example, the 3′ and/or 5′ ends of an RNA can be conjugated to other functional molecular entities such as labeling moieties, e.g., fluorophores (e.g., pyrene, TAMRA, fluorescein, Cy3 or Cy5 dyes) or protecting groups (based, e.g., on sulfur, silicon, boron or ester). The functional molecular entities can be attached to the sugar through a phosphate group and/or a linker. The terminal atom of the linker can connect to or replace the linking atom of the phosphate group or the C-3′ or C-5′ O, N, S or C group of the sugar. Alternatively, the linker can connect to or replace the terminal atom of a nucleotide surrogate (e.g., PNAs). When a linker/phosphate-functional molecular entity-linker/phosphate array is interposed between two strands of a double-stranded oligomeric compound, this array can substitute for a hairpin loop in a hairpin-type oligomeric compound. Terminal modifications can also be useful for monitoring distribution, and in such cases the preferred groups to be added include fluorophores, e.g., fluorescein or an Alexa dye, e.g., Alexa 488. Terminal modifications can also be useful for enhancing uptake; non-limiting useful modifications for this include targeting ligands.

[0328] The present disclosure also includes various salts, mixed salts, and free acid forms of the dsRNAi agents. In some embodiments, the dsRNAi agent is in a free acid form. In other embodiments, the dsRNAi agent is in a salt form. In one embodiment, the dsRNAi agent is in a sodium salt form. As commonly known in the field, when a dsRNAi agent is in the sodium salt form, sodium ions are present in the agent as counterions for the phosphodiester or phosphorothiotate groups.

[0329] In certain embodiments, the dsRNAi agent of the disclosure is further modified by covalent attachment of one or more conjugate groups. In general, conjugate groups modify one or more properties of the attached dsRNAi agent of the invention including but not limited to pharmacodynamic, pharmacokinetic, binding, absorption, cellular distribution, cellular uptake, charge and clearance. Conjugate groups are routinely used in the chemical arts and are linked directly or via an optional linking moiety or linking group to a parent compound such as an oligomeric compound. A preferred list of conjugate groups includes without limitation, intercalators, reporter molecules, polyamines, polyamides, polyethylene glycols, thioethers, polyethers, cholesterols, thiocholesterols, cholic acid moieties, folate, lipids, phospholipids, biotin, phenazine, phenanthridine, anthraquinone, adamantane, acridine, fluoresceins, rhodamines, coumarins and dyes.

[0330] In some embodiments, the targeting ligand of the disclosure comprises N-acetyl-galactosamine (GalNAc), or a GalNAc derivative, such as L96. In some embodiments, the targeting ligand is any targeting moiety disclosed in International PCT Application Publication No. WO2022266753A1. Unless obviously contradicted, the entire contents of WO2022266753A1 are hereby incorporated by reference.

[0331] In some embodiments, the structure of dsRNAi agent is selected from formula 1 to formula 33, wherein R² is the dsRNA. According to common knowledge in the art, R² generally forms a dsRNAi agent by conjugating the 3′ end or 5′ end of the sense strand to a targeting ligand. In some embodiments, the 3′ end of the sense strand is conjugated to the targeting ligand.

### Delivery and Use of an RNAi Agent

[0332] The delivery of an RNAi agent of the disclosure to a cell e.g., a cell within a subject, such as a human subject (e.g., a subject in need thereof, such as a subject having a metabolic disorder), can be achieved in several different ways. For example, delivery may be performed by contacting a cell with an RNAi agent of the disclosure either in vitro or in vivo. In vivo delivery may also be performed directly by administering a composition (or pharmaceutical composition) comprising an RNAi agent, e.g., a dsRNA, to a subject. Alternatively, in vivo delivery may be performed indirectly by administering one or more vectors that encode and direct the expression of the RNAi agent.

[0333] In one embodiment, the cells are liver cells, e.g., hepatocytes. In one embodiment, the cells are adipocytes. In certain embodiments, the RNAi agent is taken up by one or more tissues or cell types present in an organ, e.g., liver, adipose tissue.

[0334] Another aspect of the disclosure relates to a method of inhibiting or reducing the expression and/or activity of INHBE gene in a subject, comprising administering to the subject the dsRNAi agent of the disclosure. In some embodiments, the method comprises administering to a subject a therapeutically effective amount of a dsRNAi agent of the disclosure, such that expression of the INHBE gene is inhibited or reduced in the subject, e.g., in a cell in the subject. In some embodiments, the method comprises contacting a cell with a dsRNAi agent of the disclosure such that expression of the INHBE gene is inhibited or reduced in the cell. In some such embodiments, mRNA transcripts of a target gene, e.g., INHBE, are degraded in the subject or the cell, thereby inhibiting or reducing expression of INHBE gene in the subject or the cell.

[0335] Another aspect of the disclosure relates to a method of treating a subject having a metabolic disorder or at risk of having or developing a metabolic disorder, comprising administering to the subject a therapeutically effective amount of the dsRNAi agent of the disclosure, such that the subject is treated.

[0336] Another aspect of the disclosure relates to a method of treating or preventing a metabolic disorder in a subject in need thereof, comprising administering to the subject a therapeutically effective amount of the dsRNAi agent of the disclosure, such that the metabolic disorder is treated or prevented.

[0337] Another aspect of the disclosure relates to a method of treating or preventing an INHBE-associated disease or disorder in a subject in need thereof, comprising administering to the subject a therapeutically effective amount of the dsRNAi agent of the disclosure, such that the INHBE-associated disease or disorder is treated or prevented. The term “INHBE-associated disease or disorder” includes any disease or disorder that is caused by, mediated by, or associated with INHBE gene expression or protein production, and includes any disease or disorder that would benefit or be ameliorated by a decrease in INHBE gene expression or protein activity. Examples of INHBE-associated diseases or disorders include, without limitation, metabolic disorders, metabolic syndrome, type 2 diabetes, obesity, pre-diabetes, elevated triglyceride levels, lipodystrophy, liver inflammation, fatty liver, hypercholesterolemia, disorders associated with elevated liver enzymes, nonalcoholic steatohepatitis, cardiovascular disease, kidney disease, abdominal obesity, insulin resistance, hypertension, hyperlipidemia, a cardiometabolic disorder, and cancers associated with INHBE expression.

[0338] In some embodiments of methods of the disclosure, the subject is a human.

[0339] In some embodiments of methods of the disclosure, the subject has a metabolic disorder.

[0340] In some embodiments of methods of the disclosure, the metabolic disorder is one or more of metabolic syndrome, type 2 diabetes, obesity, pre-diabetes, elevated triglyceride levels, lipodystrophy, liver inflammation, fatty liver, hypercholesterolemia, disorders associated with elevated liver enzymes, nonalcoholic steatohepatitis, cardiovascular disease and kidney disease. In some embodiments metabolic syndrome includes, but is not limited to, one or more of abdominal obesity, insulin resistance, hypertension, and hyperlipidemia.

[0341] In some embodiments of methods of the disclosure, the INHBE-associated disease or disorder is one or more of a metabolic disorder, metabolic syndrome, type 2 diabetes, obesity, pre-diabetes, elevated triglyceride levels, lipodystrophy, liver inflammation, fatty liver, hypercholesterolemia, disorders associated with elevated liver enzymes, nonalcoholic steatohepatitis, cardiovascular disease, kidney disease, abdominal obesity, insulin resistance, hypertension, hyperlipidemia, a cardiometabolic disorder, and a cancer associated with INHBE expression.

[0342] Non-limiting examples of metabolic disorders include disorders of carbohydrates, e.g., diabetes, type I diabetes, type II diabetes, galactosemia, hereditary fructose intolerance, fructose 1,6-diphosphatase deficiency, glycogen storage disorders, congenital disorders of glycosylation, insulin resistance, insulin insufficiency, hyperinsulinemia, impaired glucose tolerance (IGT), abnormal glycogen metabolism; disorders of amino acid metabolism, e.g., maple syrup urine disease (MSUD), homocystinuria; disorders of organic acid metabolism, e.g., methylmalonic aciduria, 3-methylglutaconic aciduria-Barth syndrome, glutaric aciduria, 2-hydroxyglutaric aciduria—D and L forms; disorders of fatty acid beta-oxidation, e.g., medium-chain acyl-CoA dehydrogenase deficiency (MCAD), long-chain 3-hydroxyacyl-CoA dehydrogenase deficiency (LCHAD), very-long-chain acyl-CoA dehydrogenase deficiency (VLCAD); disorders of lipid metabolism, e.g., GMI Gangliosidosis, Tay-Sachs Disease, Sandhoff Disease, Fabry Disease, Gaucher Disease, Niemann-Pick Disease, Krabbe Disease, Mucolipidoses, Mucopolysaccharidoses; disorders of lipid distribution and/or storage, e.g., lipodystrophy, mitochondrial disorders, e.g., mitochondrial cardiomyopathies, Leigh disease, mitochondrial encephalopathy, lactic acidosis, stroke-like episodes (MELAS); myoclonic epilepsy with ragged-red fibers (MERRF); neuropathy; ataxia; retinitis pigmentosa (NARP); Barth syndrome; and peroxisomal disorders, e.g., Zellweger Syndrome (cerebrohepatorenal syndrome), XLinked Adrenoleukodystrophy, Refsum Disease.

[0343] In some embodiments, metabolic disorders are associated with body fat distribution and include, but are not limited to metabolic syndrome, type 2 diabetes, hyperlipidemia or dyslipidemia (high or altered circulating levels of low-density lipoprotein cholesterol (LDL-C), triglycerides, very low-density lipoprotein cholesterol (VLDL-C), apolipoprotein B or other lipid fractions), obesity (particularly abdominal obesity), lipodystrophy (such as an inability to deposit fat in adipose depots regionally (partial lipodystrophy) or in the whole body (lipoatrophy)), insulin resistance or higher or altered insulin levels at fasting or during a metabolic challenge, liver fat deposition or fatty liver body fat distribution and their complications (such as, for example, cirrhosis, fibrosis, or inflammation of the liver), nonalcoholic steatohepatitis, other types of liver inflammation, higher or elevated or altered liver enzyme levels or other markers of liver damage, inflammation or fat deposition in the liver, higher blood pressure and/or hypertension, higher blood sugar or glucose or hyperglycemia, metabolic syndrome, coronary artery disease, and other atherosclerotic conditions, and complications thereof. In some embodiments, metabolic disorders are associated with a body fat distribution characterized by higher accumulation of fat around the waist (such as greater abdominal fat or larger waist circumference) and/or lower accumulation of fat around the hips (such as lower gluteofemoral fat or smaller hip circumference), resulting in a greater waist-to-hip ratio (WHR), and higher cardio-metabolic risk independent of body mass index (BMI).

[0344] In one embodiment, a metabolic disorder is metabolic syndrome. The term “metabolic syndrome,” as used herein, refers to a disorder that includes a clustering of components that reflect overnutrition, sedentary lifestyles, genetic factors, increasing age, and resultant excess adiposity. Metabolic syndrome includes the clustering of abdominal obesity, insulin resistance, dyslipidemia, and elevated blood pressure and is associated with other comorbidities including the prothrombotic state, proinflammatory state, nonalcoholic fatty liver disease, and reproductive disorders. Metabolic syndrome is associated with an approximate doubling of cardiovascular disease risk and a 5-fold increased risk for incident type 2 diabetes mellitus. Abdominal adiposity (e.g., a large waist circumference (high waist-to-hip ratio)), high blood pressure, insulin resistance and dislipidemia are central to metabolic syndrome and its individual components (e.g., central obesity, fasting blood glucose (FBG)/pre-diabetes/diabetes, hypercholesterolemia, hypertriglyceridemia, and hypertension).

[0345] In one embodiment, a metabolic disorder is a disorder of carbohydrates. In one embodiment, the disorder of carbohydrates is diabetes. As used herein, the term “diabetes” refers to a group of metabolic disorders characterized by high blood sugar (glucose) levels which result from defects in insulin secretion or action, or both. The two most common types of diabetes, namely type 1 diabetes (also referred to as “type I diabetes”) and type 2 diabetes (also referred to as “type II diabetes”) both result from the body's inability to regulate insulin. Insulin is a hormone released by the pancreas in response to increased levels of blood sugar (glucose) in the blood.

[0346] The term “type I diabetes,” as used herein, refers to a chronic disease that occurs when the pancreas produces too little insulin to regulate blood sugar levels appropriately. Type I diabetes is also referred to as insulin-dependent diabetes mellitus, IDDM, and juvenile onset diabetes. People with type I diabetes (insulin-dependent diabetes) generally produce little or no insulin at all. Type I diabetes may result from progressive autoimmune destruction of the pancreatic beta-cells with subsequent insulin deficiency. People with type I diabetes must regularly inject insulin.

[0347] In type II diabetes (also referred to as noninsulin-dependent diabetes mellitus, NDDM), the pancreas continues to manufacture insulin, sometimes even at higher than normal levels, however the body develops resistance to its effects, resulting in a relative insulin deficiency. Obesity is a risk factor for type II diabetes, and the majority of people with this disorder are obese.

[0348] In some embodiments, diabetes includes pre-diabetes. “Pre-diabetes” refers to one or more early diabetic conditions including impaired glucose utilization, abnormal or impaired fasting glucose levels, impaired glucose tolerance, impaired insulin sensitivity and insulin resistance. Pre-diabetes is a major risk factor for the development of type 2 diabetes mellitus, cardiovascular disease and mortality. Much focus has been given to developing therapeutic interventions that prevent the development of type 2 diabetes by effectively treating pre-diabetes.

[0349] Diabetes can be diagnosed by the administration of a glucose tolerance test. Clinically, diabetes is often divided into several basic categories. Primary examples of these categories include, autoimmune diabetes mellitus, non-insulin-dependent diabetes mellitus (type 2 NDDM or NIDDM), insulin-dependent diabetes mellitus (type 1 IDDM), non-autoimmune diabetes mellitus, and maturity-onset diabetes of the young (MODY). A further category, often referred to as secondary, refers to diabetes brought about by some identifiable condition which causes or allows a diabetic syndrome to develop. Examples of secondary categories include without limitation, diabetes caused by pancreatic disease, hormonal abnormalities, drug- or chemical-induced diabetes, diabetes caused by insulin receptor abnormalities, diabetes associated with genetic syndromes, and diabetes of other causes.

[0350] In one embodiment, a metabolic disorder is a disorder of lipid metabolism. As used herein, a “lipid metabolism disorder” or “disorder of lipid metabolism” refers to any disorder associated with or caused by a disturbance in lipid metabolism. This term also includes any disorder, disease or condition that can lead to hyperlipidemia, or condition characterized by abnormal elevation of levels of any or all lipids and/or lipoproteins in the blood. This term refers to an inherited disorder, such as familial hypertriglyceridemia, familial partial lipodystrophy type 1 (FPLDI), or an induced or acquired disorder, such as a disorder induced or acquired as a result of a disease, disorder or condition (e.g., renal failure), a diet, or intake of certain drugs (e.g., as a result of highly active antiretroviral therapy (HAART) used for treating, e.g., AIDS or HIV). This term also refers to a disorder of fat distribution and/or storage, e.g., lipodystrophy.

[0351] Additional examples of disorders of lipid metabolism include, but are not limited to, atherosclerosis, dyslipidemia, hypertriglyceridemia (including drug-induced hypertriglyceridemia, diuretic-induced hypertriglyceridemia, alcohol-induced hypertriglyceridemia, beta-adrenergic blocking agent-induced hypertriglyceridemia, estrogen-induced hypertriglyceridemia, glucocorticoid-induced hypertriglyceridemia, retinoid-induced hypertriglyceridemia, cimetidine-induced hypertriglyceridemia, and familial hypertriglyceridemia), acute pancreatitis associated with hypertriglyceridemia, chylomicron syndrome, familial chylomicronemia, Apo-E deficiency or resistance, LPL deficiency or hypoactivity, hyperlipidemia (including familial combined hyperlipidemia), hypercholesterolemia, lipodystrophy, gout associated with hypercholesterolemia, xanthomatosis (subcutaneous cholesterol deposits), hyperlipidemia with heterogeneous LPL deficiency, hyperlipidemia with high LDL and heterogeneous LPL deficiency, fatty liver disease, or non-alcoholic stetohepatitis (NASH).

[0352] In one embodiment, a metabolic disorder is a cardiovascular disease. Cardiovascular diseases may include without limitation coronary artery disease (also called ischemic heart disease), hypertension, inflammation associated with coronary artery disease, restenosis, peripheral vascular diseases, or stroke.

[0353] In one embodiment, a metabolic disorder is a kidney disease. Kidney diseases may include without limitation chronic kidney disease, diabetic nephrophathy, diabetic kidney disease, or gout.

[0354] In one embodiment, a metabolic disorder is a disorder related to body weight. Body weight disorders may include without limitation obesity, hypo-metabolic states, hypothyroidism, uremia, and other conditions associated with weight gain (including rapid weight gain), weight loss, maintenance of weight loss, or risk of weight regain following weight loss.

[0355] In one embodiment, a metabolic disorder is a blood sugar disorder. Blood sugar disorders may include without limitation diabetes, hypertension, and polycystic ovarian syndrome (PCOS) related to insulin resistance.

[0356] Other exemplary metabolic disorders include without limitation renal transplantation, nephrotic syndrome, Cushing's syndrome, acromegaly, systemic lupus erythematosus, dysglobulinemia, lipodystrophy, glycogenosis type I, and Addison's disease.

[0357] In one embodiment, a metabolic disorder is primary hypertension. “Primary hypertension” may be a result of environmental or genetic causes (e.g., a result of no obvious underlying medical cause). In another embodiment, a metabolic disorder is secondary hypertension. “Secondary hypertension” has an identifiable underlying disorder which can be of multiple etiologies, including renal, vascular, and endocrine causes, e.g., renal parenchymal disease (e.g., polycystic kidneys, glomerular or interstitial disease), renal vascular disease (e.g., renal artery stenosis, fibromuscular dysplasia), endocrine disorders (e.g., adrenocorticosteroid or mineralocorticoid excess, pheochromocytoma, hyperthyroidism or hypothyroidism, growth hormone excess, hyperparathyroidism), coarctation of the aorta, or oral contraceptive use.

[0358] In one embodiment, a metabolic disorder is resistant hypertension. “Resistant hypertension” refers to blood pressure that remains above goal (e.g., above 130 mm Hg systolic or above 90 diastolic) in spite of concurrent use of three antihypertensive agents of different classes, one of which is a thiazide diuretic. Subjects whose blood pressure is controlled with four or more medications are also considered to have resistant hypertension.

[0359] In some embodiments of methods of the disclosure, the expression of the INHBE gene in the subject or the cell reduces the INHBE protein level in the subject's serum by at least 50%, at least 60%, at least 70%, at least 80%, at least 90%, or at least 95%.

[0360] In some embodiments of methods of the disclosure, the dsRNAi agent is administered to the subject at a dose of from about 0.01 mg/kg to about 50 mg/kg, or at a dose of about 0.10 mg/kg to about 50 mg/kg, for example and without limitation, at a dose of about 0.01 mg/kg to about 10 mg/kg (e.g., about 2 mg/kg, about 3 mg/kg, about 4 mg/kg, about 5 mg/kg, about 6 mg/kg, about 7 mg/kg, about 8 mg/kg, or about 9 mg/kg), about 0.5 mg/kg to about 50 mg/kg, about 10 mg/kg to about 30 mg/kg, about 10 mg/kg to about 20 mg/kg, about 15 mg/kg to about 20 mg/kg, about 15 mg/kg to about 25 mg/kg, about 15 mg/kg to 30 mg/kg, or about 20 mg/kg to about 30 mg/kg.

[0361] In some embodiments of methods of the disclosure, the method further comprises determining the level of INHBE in a sample from the subject, e.g., in a blood, serum, liver tissue or adipose tissue sample. The level of INHBE may be determined in a sample obtained from the subject before administration of the dsRNAi agent, after administration of the dsRNAi agent, or during administration of the dsRNAi agent (e.g., to monitor efficacy or efficiency of treatments, to monitor INHBE mRNA and/or protein levels before, during or after treatment, etc.).

[0362] In some embodiments of methods of the disclosure, the method further comprises administering to the subject an additional therapeutic agent for treating a metabolic disorder. Examples of additional therapeutic agent(s) include, but are not limited to, insulin, glucagon-like peptide 1 agonist, glucose-dependent insulinotropic polypeptide (GIP) receptor agonist, glucagon receptor agonist, sulfonylurea, seglitinide, biguanide, thiazolidinedione, alpha-glucosidase inhibitor, SGLT2 inhibitor, DPP-4 inhibitor, HMG-CoA reductase inhibitor, statin, and any combination of the foregoing. Additional therapeutic agents may be administered simultaneously or sequentially with the dsRNAi agent or composition of the disclosure. In some embodiments, the dsRNAi agent is administered before an additional therapeutic agent. In other embodiments, the dsRNAi agent is administered after an additional therapeutic agent. In certain embodiments, the dsRNAi agent and the additional therapeutic agent are administered at the same time.

[0363] In some embodiments, a dsRNAi agent of the disclosure is administered by injection or by infusion. In one embodiment, a dsRNAi agent is administered subcutaneously. In one embodiment, a dsRNAi agent is administered intramuscularly. In one embodiment, a dsRNAi agent is administered intravenously. In some embodiments, a dsRNAi agent is administered by pulmonary systemic administration, such as intranasal administration or oral inhalation administration.

[0364] In some embodiments, a pharmaceutical composition of the disclosure comprises a dsRNAi agent of the disclosure or a pharmaceutically acceptable salt thereof, and a pharmaceutically acceptable carrier. The pharmaceutical composition can be practically used for the prevention and/or treatment of various INHBE-associated diseases or disorders as described herein. Acceptable carriers (or excipients) are substances other than active pharmaceutical ingredients (APIs, therapeutic products, such as the dsRNAi agents of the disclosure) that are intentionally included in the drug delivery system. The carrier or excipient is not or is not intended to be therapeutically effective in the intended dosage. For example and without limitation, carriers or excipients can play the following roles:
[0365] a) facilitate the handling of the drug delivery system during manufacture;
[0366] b) protect, support or enhance the stability, bioavailability or tolerability of the API;
[0367] c) facilitate in product identification; and/or
[0368] d) enhance any other property such as the overall safety, efficacy or delivery of the API during storage or use.

[0369] Carriers or excipients include, but are not limited to, the following components: absorption enhancers, anti-adherents, antifoaming agents, antioxidants, binders, buffers, carriers, coatings, colorants, delivery enhancers, delivery polymers substances, detergents, dextran, dextrose, diluents, disintegrants, emulsifiers, bulking agents, fillers, flavoring agents, glidants, wetting agents, lubricants, oils, polymers, preservatives, saline, salts, solvents, sugars, surfactants, suspending agents, sustained release matrices, sweeteners, thickeners, tonicity agents, vehicles, water repellents and wetting agents.

[0370] In some embodiments, the carrier of the pharmaceutical composition is an unbuffered solution or a buffered solution. Typical unbuffered solutions are saline or water, and buffered solutions include one or more of acetate, citrate, prolamine, carbonate and phosphate. In some embodiments, the buffer solution is phosphate buffered saline (PBS).

### Examples

[0371] The present invention will be more readily understood by referring to the following examples, which are provided to illustrate the invention and are not to be construed as limiting the scope thereof in any manner. The entire contents of all references, patents and published patent applications cited throughout this application, as well as the Figures, are hereby incorporated herein by reference.

[0372] Unless defined otherwise or the context clearly dictates otherwise, all technical and scientific terms used herein have the same meaning as commonly understood by one of ordinary skill in the art to which this invention belongs. It should be understood that any methods and materials similar or equivalent to those described herein can be used in the practice or testing of the invention. Unless otherwise specified, the materials and instruments used in the present disclosure are generally commercially available.

### Example 1. Synthesis of siRNA

### 1.1 Target Sequence Screening

[0373] siRNAs were designed according to the full-length INHBE mRNA sequence, and all sequences were obtained from the NCBI gene database (https://www.ncbi.nlm.nih.gov/gene/). All siRNAs were designed to ensure complete sequence identity with humans (Gene ID: 83729; SEQ ID NO: 1619) and cynomolgus monkeys (Gene ID: 102127493; SEQ ID NO: 1620).

[0374] After scanning the full-length sequence, all potential siRNA sequences with a length of 19 nucleotides and matching with the sequences of cynomolgus monkeys were selected. All the potential sequences were compared to human whole transcriptome mRNA sequences by BLAST and siRNAs with potential off-target effects were removed. The activity of all siRNAs was evaluated by the principle of rational design of siRNAs, and siRNAs with low theoretical activity were removed.

1.2 siRNA Synthesis

[0375] The siRNAs were designed to target INHBE in different regions and two additional nucleotides complementary to the mRNA or dTdT were added to the antisense strand for siRNA sequences with blunt ends (for example, IN-151 to IN-230), and then synthesized and annealed by Suzhou Biosyntech Co., Ltd. The siRNA sequences are shown in Table 1 and Table 2.

TABLE 1
Sense and antisense strand sequences of unmodified INHBE dsRNAi agents

| | Sense Strand Sequences | SEQ | Antisense Strand Sequences | SEQ |
|---|---|---|---|---|
| Duplex | 5′ to 3′ | ID NO: | 5′ to 3′ | ID NO: |
| IN-001 | GUGAGGGUCAAGCACAGCU | 1 | AGCUGUGCUUGACCCUCACAG | 2 |
| IN-002 | GAGGGUCAAGCACAGCUAU | 3 | AUAGCUGUGCUUGACCCUCAC | 4 |
| IN-003 | GGGUCAAGCACAGCUAUCC | 5 | GGAUAGCUGUGCUUGACCCUC | 6 |
| IN-004 | GGUCAAGCACAGCUAUCCA | 7 | UGGAUAGCUGUGCUUGACCCU | 8 |
| IN-005 | GUCAAGCACAGCUAUCCAU | 9 | AUGGAUAGCUGUGCUUGACCC | 10 |
| IN-006 | UCAAGCACAGCUAUCCAUC | 11 | GAUGGAUAGCUGUGCUUGACC | 12 |
| IN-007 | CAAGCACAGCUAUCCAUCA | 13 | UGAUGGAUAGCUGUGCUUGAC | 14 |
| IN-008 | AAGCACAGCUAUCCAUCAG | 15 | CUGAUGGAUAGCUGUGCUUGA | 16 |
| IN-009 | AGCACAGCUAUCCAUCAGA | 17 | UCUGAUGGAUAGCUGUGCUUG | 18 |
| IN-010 | GCACAGCUAUCCAUCAGAU | 19 | AUCUGAUGGAUAGCUGUGCUU | 20 |
| IN-011 | CACAGCUAUCCAUCAGAUG | 21 | CAUCUGAUGGAUAGCUGUGCU | 22 |
| IN-012 | ACAGCUAUCCAUCAGAUGA | 23 | UCAUCUGAUGGAUAGCUGUGC | 24 |
| IN-013 | CAGCUAUCCAUCAGAUGAU | 25 | AUCAUCUGAUGGAUAGCUGUG | 26 |
| IN-014 | AGCUAUCCAUCAGAUGAUC | 27 | GAUCAUCUGAUGGAUAGCUGU | 28 |
| IN-015 | GCUAUCCAUCAGAUGAUCU | 29 | AGAUCAUCUGAUGGAUAGCUG | 30 |
| IN-016 | CUAUCCAUCAGAUGAUCUA | 31 | UAGAUCAUCUGAUGGAUAGCU | 32 |
| IN-017 | AUCCAUCAGAUGAUCUACU | 33 | AGUAGAUCAUCUGAUGGAUAG | 34 |
| IN-018 | UCCAUCAGAUGAUCUACUU | 35 | AAGUAGAUCAUCUGAUGGAUA | 36 |
| IN-019 | CCAUCAGAUGAUCUACUUU | 37 | AAAGUAGAUCAUCUGAUGGAU | 38 |
| IN-020 | CAUCAGAUGAUCUACUUUC | 39 | GAAAGUAGAUCAUCUGAUGGA | 40 |
| IN-021 | AUCAGAUGAUCUACUUUCA | 41 | UGAAAGUAGAUCAUCUGAUGG | 42 |
| IN-022 | CAGAUGAUCUACUUUCAGC | 43 | GCUGAAAGUAGAUCAUCUGAU | 44 |
| IN-023 | GAUGAUCUACUUUCAGCCU | 45 | AGGCUGAAAGUAGAUCAUCUG | 46 |
| IN-024 | AUGAUCUACUUUCAGCCUU | 47 | AAGGCUGAAAGUAGAUCAUCU | 48 |
| IN-025 | UUCCUGAGUCCCAGACAAU | 49 | AUUGUCUGGGACUCAGGAAGG | 50 |
| IN-026 | UCCUGAGUCCCAGACAAUA | 51 | UAUUGUCUGGGACUCAGGAAG | 52 |
| IN-027 | UGAGUCCCAGACAAUAGAA | 53 | UUCUAUUGUCUGGGACUCAGG | 54 |
| IN-028 | GUCCCAGACAAUAGAAGAC | 55 | GUCUUCUAUUGUCUGGGACUC | 56 |
| IN-029 | CAAUAGAAGACAGGUGGCU | 57 | AGCCACCUGUCUUCUAUUGUC | 58 |
| IN-030 | AUAGAAGACAGGUGGCUGU | 59 | ACAGCCACCUGUCUUCUAUUG | 60 |
| IN-031 | AGGUGUGGCAGUGGUGUCU | 61 | AGACACCACUGCCACACCUAC | 62 |
| IN-032 | CAUUGGCCCCCAGCAAUCA | 63 | UGAUUGCUGGGGGCCAAUGAG | 64 |
| IN-033 | AGCUAGCCAAGCAGCAAAU | 65 | AUUUGCUGCUUGGCUAGCUCC | 66 |
| IN-034 | UAGCCAAGCAGCAAAUCCU | 67 | AGGAUUUGCUGCUUGGCUAGC | 68 |
| IN-035 | ACCAGUCGUCCCAGAAUAA | 69 | UUAUUCUGGGACGACUGGUCA | 70 |
| IN-036 | CAGUCGUCCCAGAAUAACU | 71 | AGUUAUUCUGGGACGACUGGU | 72 |
| IN-037 | AGUCGUCCCAGAAUAACUC | 73 | GAGUUAUUCUGGGACGACUGG | 74 |
| IN-038 | UCGUCCCAGAAUAACUCAU | 75 | AUGAGUUAUUCUGGGACGACU | 76 |
| IN-039 | GGAAUGGGGAGGAGGUCAU | 77 | AUGACCUCCUCCCCAUUCCCU | 78 |
| IN-040 | GAGGUCAUCAGCUUUGCUA | 79 | UAGCAAAGCUGAUGACCUCCU | 80 |
| IN-041 | GGUCAUCAGCUUUGCUACU | 81 | AGUAGCAAAGCUGAUGACCUC | 82 |
| IN-042 | GUCAUCAGCUUUGCUACUG | 83 | CAGUAGCAAAGCUGAUGACCU | 84 |
| IN-043 | UCAUCAGCUUUGCUACUGU | 85 | ACAGUAGCAAAGCUGAUGACC | 86 |
| IN-044 | CAUCAGCUUUGCUACUGUC | 87 | GACAGUAGCAAAGCUGAUGAC | 88 |
| IN-045 | GCUUUGCUACUGUCACAGA | 89 | UCUGUGACAGUAGCAAAGCUG | 90 |
| IN-046 | UUUGCUACUGUCACAGACU | 91 | AGUCUGUGACAGUAGCAAAGC | 92 |
| IN-047 | ACUGUCACAGACUCCACUU | 93 | AAGUGGAGUCUGUGACAGUAG | 94 |
| IN-048 | ACCCUUCCUGGCACUCUUU | 95 | AAAGAGUGCCAGGAAGGGUGG | 96 |
| IN-049 | CUUCCUGGCACUCUUUGCU | 97 | AGCAAAGAGUGCCAGGAAGGG | 98 |
| IN-050 | GCACUCUUUGCUUGAGGAU | 99 | AUCCUCAAGCAAAGAGUGCCA | 100 |
| IN-051 | ACUCUUUGCUUGAGGAUCU | 101 | AGAUCCUCAAGCAAAGAGUGC | 102 |
| IN-052 | CUCUUUGCUUGAGGAUCUU | 103 | AAGAUCCUCAAGCAAAGAGUG | 104 |
| IN-053 | GCUGGCAUACCUUAACUCU | 105 | AGAGUUAAGGUAUGCCAGCCC | 106 |
| IN-054 | AGUGGCUUGAGGGGUGAGA | 107 | UCUCACCCCUCAAGCCACUAG | 108 |
| IN-055 | CUUGAGGGGUGAGAAGUCU | 109 | AGACUUCUCACCCCUCAAGCC | 110 |
| IN-056 | AGUCUGGUGUCCUGAAACU | 111 | AGUUUCAGGACACCAGACUUC | 112 |
| IN-057 | CUGGUGUCCUGAAACUGCA | 113 | UGCAGUUUCAGGACACCAGAC | 114 |
| IN-058 | GUGUCCUGAAACUGCAACU | 115 | AGUUGCAGUUUCAGGACACCA | 116 |
| IN-059 | UGUCCUGAAACUGCAACUA | 117 | UAGUUGCAGUUUCAGGACACC | 118 |
| IN-060 | GUCCUGAAACUGCAACUAG | 119 | CUAGUUGCAGUUUCAGGACAC | 120 |
| IN-061 | AGAAGGCAACAGCACAGUU | 121 | AACUGUGCUGUUGCCUUCUAG | 122 |
| IN-062 | AGGCAACAGCACAGUUACU | 123 | AGUAACUGUGCUGUUGCCUUC | 124 |
| IN-063 | CCUUCCUAGAGCUUAAGAU | 125 | AUCUUAAGCUCUAGGAAGGGC | 126 |
| IN-064 | CUUCCUAGAGCUUAAGAUC | 127 | GAUCUUAAGCUCUAGGAAGGG | 128 |
| IN-065 | AGAGCUUAAGAUCCGAGCC | 129 | GGCUCGGAUCUUAAGCUCUAG | 130 |
| IN-066 | GAGCUUAAGAUCCGAGCCA | 131 | UGGCUCGGAUCUUAAGCUCUA | 132 |
| IN-067 | GCUUAAGAUCCGAGCCAAU | 133 | AUUGGCUCGGAUCUUAAGCUC | 134 |
| IN-068 | CCUGCGACCCCCUUAUGUU | 135 | AACAUAAGGGGGUCGCAGGCU | 136 |
| IN-069 | UGUUGCAGGCGAGACCAUU | 137 | AAUGGUCUCGCCUGCAACAUA | 138 |
| IN-070 | CGAGACCAUUACGUAGACU | 139 | AGUCUACGUAAUGGUCUCGCC | 140 |
| IN-071 | GAGACCAUUACGUAGACUU | 141 | AAGUCUACGUAAUGGUCUCGC | 142 |
| IN-072 | AUUACGUAGACUUCCAGGA | 143 | UCCUGGAAGUCUACGUAAUGG | 144 |
| IN-073 | AGGGGUACCAGCUGAAUUA | 145 | UAAUUCAGCUGGUACCCCUCG | 146 |
| IN-074 | AUUGCUGCCUCUUUCCAUU | 147 | AAUGGAAAGAGGCAGCAAUGC | 148 |
| IN-075 | CUUUCCAUUCUGCCGUCUU | 149 | AAGACGGCAGAAUGGAAAGAG | 150 |
| IN-076 | CCUCCUCAAAGCCAACAAU | 151 | AUUGUUGGCUUUGAGGAGGCU | 152 |
| IN-077 | CCUCAAAGCCAACAAUCCU | 153 | AGGAUUGUUGGCUUUGAGGAG | 154 |
| IN-078 | CUCAAAGCCAACAAUCCUU | 155 | AAGGAUUGUUGGCUUUGAGGA | 156 |
| IN-079 | CCUGCCAGUACCUCCUGUU | 157 | AACAGGAGGUACUGGCAGGCC | 158 |
| IN-080 | UCUCCUCUACCUGGAUCAU | 159 | AUGAUCCAGGUAGAGGAGAGA | 160 |
| IN-081 | CUCCUCUACCUGGAUCAUA | 161 | UAUGAUCCAGGUAGAGGAGAG | 162 |
| IN-082 | UCCUCUACCUGGAUCAUAA | 163 | UUAUGAUCCAGGUAGAGGAGA | 164 |
| IN-083 | CCUCUACCUGGAUCAUAAU | 165 | AUUAUGAUCCAGGUAGAGGAG | 166 |
| IN-084 | CCUGGAUCAUAAUGGCAAU | 167 | AUUGCCAUUAUGAUCCAGGUA | 168 |
| IN-085 | UGGAUCAUAAUGGCAAUGU | 169 | ACAUUGCCAUUAUGAUCCAGG | 170 |
| IN-086 | AUAAUGGCAAUGUGGUCAA | 171 | UUGACCACAUUGCCAUUAUGA | 172 |
| IN-087 | AUGUGGUCAAGACGGAUGU | 173 | ACAUCCGUCUUGACCACAUUG | 174 |
| IN-088 | AGACGGAUGUGCCAGAUAU | 175 | AUAUCUGGCACAUCCGUCUUG | 176 |
| IN-089 | UUUGGAGUGAAGAGACCAA | 177 | UUGGUCUCUUCACUCCAAAGC | 178 |
| IN-090 | AGUGAAGAGACCAAGAUGA | 179 | UCAUCUUGGUCUCUUCACUCC | 180 |
| IN-091 | GUGAAGAGACCAAGAUGAA | 181 | UUCAUCUUGGUCUCUUCACUC | 182 |
| IN-092 | GAAGAGACCAAGAUGAAGU | 183 | ACUUCAUCUUGGUCUCUUCAC | 184 |
| IN-093 | AAGAGACCAAGAUGAAGUU | 185 | AACUUCAUCUUGGUCUCUUCA | 186 |
| IN-094 | AGAGACCAAGAUGAAGUUU | 187 | AAACUUCAUCUUGGUCUCUUC | 188 |
| IN-095 | UGACUGGAGGCAUCAGAUU | 189 | AAUCUGAUGCCUCCAGUCACA | 190 |
| IN-096 | AACAACCACCUGGCAAUAU | 191 | AUAUUGCCAGGUGGUUGUUGG | 192 |
| IN-097 | CCACCUGGCAAUAUGACUC | 193 | GAGUCAUAUUGCCAGGUGGUU | 194 |
| IN-098 | CCUGGCAAUAUGACUCACU | 195 | AGUGAGUCAUAUUGCCAGGUG | 196 |
| IN-099 | CUGGCAAUAUGACUCACUU | 197 | AAGUGAGUCAUAUUGCCAGGU | 198 |
| IN-100 | CAAAUGGGCACUUUCUUGU | 199 | ACAAGAAAGUGCCCAUUUGGG | 200 |
| IN-101 | AAUGGGCACUUUCUUGUCU | 201 | AGACAAGAAAGUGCCCAUUUG | 202 |
| IN-102 | CACUUUCUUGUCUGAGACU | 203 | AGUCUCAGACAAGAAAGUGCC | 204 |
| IN-103 | ACUUUCUUGUCUGAGACUC | 205 | GAGUCUCAGACAAGAAAGUGC | 206 |
| IN-104 | CUUUCUUGUCUGAGACUCU | 207 | AGAGUCUCAGACAAGAAAGUG | 208 |
| IN-105 | UGUCUGAGACUCUGGCUUA | 209 | UAAGCCAGAGUCUCAGACAAG | 210 |
| IN-106 | UCUGAGACUCUGGCUUAUU | 211 | AAUAAGCCAGAGUCUCAGACA | 212 |
| IN-107 | UUAUUCCAGGUUGGCUGAU | 213 | AUCAGCCAACCUGGAAUAAGC | 214 |
| IN-108 | UGUGUUGGGAGAUGGGUAA | 215 | UUACCCAUCUCCCAACACAUC | 216 |
| IN-109 | GUGUUGGGAGAUGGGUAAA | 217 | UUUACCCAUCUCCCAACACAU | 218 |
| IN-110 | GGGAGAUGGGUAAAGCGUU | 219 | AACGCUUUACCCAUCUCCCAA | 220 |
| IN-111 | GGAGAUGGGUAAAGCGUUU | 221 | AAACGCUUUACCCAUCUCCCA | 222 |
| IN-112 | GGGUAAAGCGUUUCUUCUA | 223 | UAGAAGAAACGCUUUACCCAU | 224 |
| IN-113 | GGUAAAGCGUUUCUUCUAA | 225 | UUAGAAGAAACGCUUUACCCA | 226 |
| IN-114 | GUAAAGCGUUUCUUCUAAA | 227 | UUUAGAAGAAACGCUUUACCC | 228 |
| IN-115 | UAAAGCGUUUCUUCUAAAG | 229 | CUUUAGAAGAAACGCUUUACC | 230 |
| IN-116 | GUUUCUUCUAAAGGGGUCU | 231 | AGACCCCUUUAGAAGAAACGC | 232 |
| IN-117 | UUUCUUCUAAAGGGGUCUA | 233 | UAGACCCCUUUAGAAGAAACG | 234 |
| IN-118 | GGUCUACCCAGAAAGCAUG | 235 | CAUGCUUUCUGGGUAGACCCC | 236 |
| IN-119 | UCUACCCAGAAAGCAUGAU | 237 | AUCAUGCUUUCUGGGUAGACC | 238 |
| IN-120 | CUACCCAGAAAGCAUGAUU | 239 | AAUCAUGCUUUCUGGGUAGAC | 240 |
| IN-121 | UACCCAGAAAGCAUGAUUU | 241 | AAAUCAUGCUUUCUGGGUAGA | 242 |
| IN-122 | CCAGAAAGCAUGAUUUCCU | 243 | AGGAAAUCAUGCUUUCUGGGU | 244 |
| IN-123 | AAGCAUGAUUUCCUGCCCU | 245 | AGGGCAGGAAAUCAUGCUUUC | 246 |
| IN-124 | AUGAUUUCCUGCCCUAAGU | 247 | ACUUAGGGCAGGAAAUCAUGC | 248 |
| IN-125 | CCCUAAGUCCUGUGAGAAG | 249 | CUUCUCACAGGACUUAGGGCA | 250 |
| IN-126 | CCUAAGUCCUGUGAGAAGA | 251 | UCUUCUCACAGGACUUAGGGC | 252 |
| IN-127 | CUAAGUCCUGUGAGAAGAU | 253 | AUCUUCUCACAGGACUUAGGG | 254 |
| IN-128 | AAGUCCUGUGAGAAGAUGU | 255 | ACAUCUUCUCACAGGACUUAG | 256 |
| IN-129 | GAGGGAAGGCAGAGAAAAA | 257 | UUUUUCUCUGCCUUCCCUCCC | 258 |
| IN-130 | AGGGAAGGCAGAGAAAAAU | 259 | AUUUUUCUCUGCCUUCCCUCC | 260 |
| IN-131 | GGGAAGGCAGAGAAAAAUU | 261 | AAUUUUUCUCUGCCUUCCCUC | 262 |
| IN-132 | GGAAGGCAGAGAAAAAUUA | 263 | UAAUUUUUCUCUGCCUUCCCU | 264 |
| IN-133 | GAAGGCAGAGAAAAAUUAC | 265 | GUAAUUUUUCUCUGCCUUCCC | 266 |
| IN-134 | AAGGCAGAGAAAAAUUACU | 267 | AGUAAUUUUUCUCUGCCUUCC | 268 |
| IN-135 | AGGCAGAGAAAAAUUACUU | 269 | AAGUAAUUUUUCUCUGCCUUC | 270 |
| IN-136 | CCUCUCCCAAGAUGAGAAA | 271 | UUUCUCAUCUUGGGAGAGGCU | 272 |
| IN-137 | UCUCCCAAGAUGAGAAAGU | 273 | ACUUUCUCAUCUUGGGAGAGG | 274 |
| IN-138 | GGAGGAGGAAGCAGAUAGA | 275 | UCUAUCUGCUUCCUCCUCCCC | 276 |
| IN-139 | GAGGAGGAAGCAGAUAGAU | 277 | AUCUAUCUGCUUCCUCCUCCC | 278 |
| IN-140 | AGGGCUGUUGAGGUACCUU | 279 | AAGGUACCUCAACAGCCCUUA | 280 |
| IN-141 | GGCUGUUGAGGUACCUUAA | 281 | UUAAGGUACCUCAACAGCCCU | 282 |
| IN-142 | GUUGAGGUACCUUAAGGGA | 283 | UCCCUUAAGGUACCUCAACAG | 284 |
| IN-143 | UUGAGGUACCUUAAGGGAA | 285 | UUCCCUUAAGGUACCUCAACA | 286 |
| IN-144 | GAGGUACCUUAAGGGAAGG | 287 | CCUUCCCUUAAGGUACCUCAA | 288 |
| IN-145 | GGAAGGUCAAGAGGGAGAU | 289 | AUCUCCCUCUUGACCUUCCCU | 290 |
| IN-146 | GAAACAGGAGUCAGGAAAA | 291 | UUUUCCUGACUCCUGUUUCUG | 292 |
| IN-147 | AAACAGGAGUCAGGAAAAU | 293 | AUUUUCCUGACUCCUGUUUCU | 294 |
| IN-148 | AACAGGAGUCAGGAAAAUG | 295 | CAUUUUCCUGACUCCUGUUUC | 296 |
| IN-149 | GUCAGGAAAAUGAGGCACU | 297 | AGUGCCUCAUUUUCCUGACUC | 298 |
| IN-151 | GCACUAAGCCUAAGAAGUU | 299 | AACUUCUUAGGCUUAGUGC | 300 |
| IN-152 | UAAGAAGUUCCCUGGUUUU | 301 | AAAACCAGGGAACUUCUUA | 302 |
| IN-153 | CACUGGGAGACAAGCAUUU | 303 | AAAUGCUUGUCUCCCAGUG | 304 |
| IN-154 | ACUGGGAGACAAGCAUUUA | 305 | UAAAUGCUUGUCUCCCAGU | 306 |
| IN-155 | CUGGGAGACAAGCAUUUAU | 307 | AUAAAUGCUUGUCUCCCAG | 308 |
| IN-156 | UGGGAGACAAGCAUUUAUA | 309 | UAUAAAUGCUUGUCUCCCA | 310 |
| IN-157 | GGGAGACAAGCAUUUAUAC | 311 | GUAUAAAUGCUUGUCUCCC | 312 |
| IN-158 | GGAGACAAGCAUUUAUACU | 313 | AGUAUAAAUGCUUGUCUCC | 314 |
| IN-159 | GAGACAAGCAUUUAUACUU | 315 | AAGUAUAAAUGCUUGUCUC | 316 |
| IN-160 | AGACAAGCAUUUAUACUUU | 317 | AAAGUAUAAAUGCUUGUCU | 318 |
| IN-161 | ACAAGCAUUUAUACUUUCU | 319 | AGAAAGUAUAAAUGCUUGU | 320 |
| IN-162 | CAAGCAUUUAUACUUUCUU | 321 | AAGAAAGUAUAAAUGCUUG | 322 |
| IN-163 | GCAUUUAUACUUUCUUUCU | 323 | AGAAAGAAAGUAUAAAUGC | 324 |
| IN-164 | CAUUUAUACUUUCUUUCUU | 325 | AAGAAAGAAAGUAUAAAUG | 326 |
| IN-165 | GGAGAAAGAAAAUCAACAA | 327 | UUGUUGAUUUUCUUUCUCC | 328 |
| IN-166 | AGAAAGAAAAUCAACAAAU | 329 | AUUUGUUGAUUUUCUUUCU | 330 |
| IN-167 | UCAACAAAUGUGAGUCAUA | 331 | UAUGACUCACAUUUGUUGA | 332 |
| IN-168 | CAACAAAUGUGAGUCAUAA | 333 | UUAUGACUCACAUUUGUUG | 334 |
| IN-169 | CAAAUGUGAGUCAUAAAGA | 335 | UCUUUAUGACUCACAUUUG | 336 |
| IN-170 | GUGAGUCAUAAAGAAGGGU | 337 | ACCCUUCUUUAUGACUCAC | 338 |
| IN-171 | UGAGUCAUAAAGAAGGGUU | 339 | AACCCUUCUUUAUGACUCA | 340 |
| IN-172 | GAGUCAUAAAGAAGGGUUA | 341 | UAACCCUUCUUUAUGACUC | 342 |
| IN-173 | CAUAAAGAAGGGUUAGGGU | 343 | ACCCUAACCCUUCUUUAUG | 344 |
| IN-174 | AUGGUCCAGAGCAACAGUU | 345 | AACUGUUGCUCUGGACCAU | 346 |
| IN-175 | GUCCAGAGCAACAGUUCUU | 347 | AAGAACUGUUGCUCUGGAC | 348 |
| IN-176 | CAGAGCAACAGUUCUUCAA | 349 | UUGAAGAACUGUUGCUCUG | 350 |
| IN-177 | GAGCAACAGUUCUUCAAGU | 351 | ACUUGAAGAACUGUUGCUC | 352 |
| IN-178 | ACAGUUCUUCAAGUGUACU | 353 | AGUACACUUGAAGAACUGU | 354 |
| IN-179 | GUGUACUCUGUAGGCUUCU | 355 | AGAAGCCUACAGAGUACAC | 356 |
| IN-180 | GCUUCUGGGAGGUCCCUUU | 357 | AAAGGGACCUCCCAGAAGC | 358 |
| IN-181 | UCAGGGGUGUCCACAAAGU | 359 | ACUUUGUGGACACCCCUGA | 360 |
| IN-182 | GGGUGUCCACAAAGUCAAA | 361 | UUUGACUUUGUGGACACCC | 362 |
| IN-183 | GGUGUCCACAAAGUCAAAG | 363 | CUUUGACUUUGUGGACACC | 364 |
| IN-184 | UGUCCACAAAGUCAAAGCU | 365 | AGCUUUGACUUUGUGGACA | 366 |
| IN-185 | UCCACAAAGUCAAAGCUAU | 367 | AUAGCUUUGACUUUGUGGA | 368 |
| IN-186 | CCACAAAGUCAAAGCUAUU | 369 | AAUAGCUUUGACUUUGUGG | 370 |
| IN-187 | CACAAAGUCAAAGCUAUUU | 371 | AAAUAGCUUUGACUUUGUG | 372 |
| IN-188 | ACAAAGUCAAAGCUAUUUU | 373 | AAAAUAGCUUUGACUUUGU | 374 |
| IN-189 | AGUCAAAGCUAUUUUCAUA | 375 | UAUGAAAAUAGCUUUGACU | 376 |
| IN-190 | GUCAAAGCUAUUUUCAUAA | 377 | UUAUGAAAAUAGCUUUGAC | 378 |
| IN-191 | UCAAAGCUAUUUUCAUAAU | 379 | AUUAUGAAAAUAGCUUUGA | 380 |
| IN-192 | AGCUAUUUUCAUAAUAAUA | 381 | UAUUAUUAUGAAAAUAGCU | 382 |
| IN-193 | GCUAUUUUCAUAAUAAUAC | 383 | GUAUUAUUAUGAAAAUAGC | 384 |
| IN-194 | CUAUUUUCAUAAUAAUACU | 385 | AGUAUUAUUAUGAAAAUAG | 386 |
| IN-195 | AUUUUCAUAAUAAUACUAA | 387 | UUAGUAUUAUUAUGAAAAU | 388 |
| IN-196 | CAUAAUAAUACUAACAUGU | 389 | ACAUGUUAGUAUUAUUAUG | 390 |
| IN-197 | AUAAUAAUACUAACAUGUU | 391 | AACAUGUUAGUAUUAUUAU | 392 |
| IN-198 | AUAAUACUAACAUGUUAUU | 393 | AAUAACAUGUUAGUAUUAU | 394 |
| IN-199 | UAAUACUAACAUGUUAUUU | 395 | AAAUAACAUGUUAGUAUUA | 396 |
| IN-200 | ACUAACAUGUUAUUUGCCU | 397 | AGGCAAAUAACAUGUUAGU | 398 |
| IN-201 | UAACAUGUUAUUUGCCUUU | 399 | AAAGGCAAAUAACAUGUUA | 400 |
| IN-202 | CAUGUUAUUUGCCUUUUGA | 401 | UCAAAAGGCAAAUAACAUG | 402 |
| IN-203 | UGUUAUUUGCCUUUUGAAU | 403 | AUUCAAAAGGCAAAUAACA | 404 |
| IN-204 | GUUAUUUGCCUUUUGAAUU | 405 | AAUUCAAAAGGCAAAUAAC | 406 |
| IN-205 | UGCCUUUUGAAUUCUCAUU | 407 | AAUGAGAAUUCAAAAGGCA | 408 |
| IN-206 | GCCUUUUGAAUUCUCAUUA | 409 | UAAUGAGAAUUCAAAAGGC | 410 |
| IN-207 | CCUUUUGAAUUCUCAUUAU | 411 | AUAAUGAGAAUUCAAAAGG | 412 |
| IN-208 | UGAAUUCUCAUUAUCUUAA | 413 | UUAAGAUAAUGAGAAUUCA | 414 |
| IN-209 | GAAUUCUCAUUAUCUUAAA | 415 | UUUAAGAUAAUGAGAAUUC | 416 |
| IN-210 | AUUCUCAUUAUCUUAAAAU | 417 | AUUUUAAGAUAAUGAGAAU | 418 |
| IN-211 | CUCAUUAUCUUAAAAUUGU | 419 | ACAAUUUUAAGAUAAUGAG | 420 |
| IN-212 | CAUUAUCUUAAAAUUGUAU | 421 | AUACAAUUUUAAGAUAAUG | 422 |
| IN-213 | AUUAUCUUAAAAUUGUAUU | 423 | AAUACAAUUUUAAGAUAAU | 424 |
| IN-214 | GGCCGUGUGACAUGUGAUU | 425 | AAUCACAUGUCACACGGCC | 426 |
| IN-215 | GCCGUGUGACAUGUGAUUA | 427 | UAAUCACAUGUCACACGGC | 428 |
| IN-216 | CCGUGUGACAUGUGAUUAC | 429 | GUAAUCACAUGUCACACGG | 430 |
| IN-217 | CGUGUGACAUGUGAUUACA | 431 | UGUAAUCACAUGUCACACG | 432 |
| IN-218 | GUGUGACAUGUGAUUACAU | 433 | AUGUAAUCACAUGUCACAC | 434 |
| IN-219 | UGACAUGUGAUUACAUCAU | 435 | AUGAUGUAAUCACAUGUCA | 436 |
| IN-220 | ACAUGUGAUUACAUCAUCU | 437 | AGAUGAUGUAAUCACAUGU | 438 |
| IN-221 | CAUGUGAUUACAUCAUCUU | 439 | AAGAUGAUGUAAUCACAUG | 440 |
| IN-222 | GUGAUUACAUCAUCUUUCU | 441 | AGAAAGAUGAUGUAAUCAC | 442 |
| IN-223 | GAUUACAUCAUCUUUCUGA | 443 | UCAGAAAGAUGAUGUAAUC | 444 |
| IN-224 | CAUCAUCUUUCUGACAUCA | 445 | UGAUGUCAGAAAGAUGAUG | 446 |
| IN-225 | UCAUCUUUCUGACAUCAUU | 447 | AAUGAUGUCAGAAAGAUGA | 448 |
| IN-226 | UCUUUCUGACAUCAUUGUU | 449 | AACAAUGAUGUCAGAAAGA | 450 |
| IN-227 | CUUUCUGACAUCAUUGUUA | 451 | UAACAAUGAUGUCAGAAAG | 452 |
| IN-228 | CAUUGUUAAUGGAAUGUGU | 453 | ACACAUUCCAUUAACAAUG | 454 |
| IN-229 | UGUUAAUGGAAUGUGUGCU | 455 | AGCACACAUUCCAUUAACA | 456 |
| IN-230 | GUUAAUGGAAUGUGUGCUU | 457 | AAGCACACAUUCCAUUAAC | 458 |
| IN-231 | UCAUCAGCUUUGCUACUGU | 459 | ACAGUAGCAAAGCUGAUGAUC | 460 |
| IN-232 | UCAUCAGCUUUGCUACUGU | 461 | ACAGUAGCAAAGCUGAUGAUU | 462 |
| IN-233 | UCAUCAGCUUUGCUACUGU | 463 | ACAGUAGCAAAGCUGAUGACU | 464 |
| IN-234 | CCAUCAGCUUUGCUACUGU | 465 | ACAGUAGCAAAGCUGAUGGUU | 466 |
| IN-235 | GCAUCAGCUUUGCUACUGU | 467 | ACAGUAGCAAAGCUGAUGCUU | 468 |
| IN-236 | CAUCAGCUUUGCUACUGUC | 469 | GACAGUAGCAAAGCUGAUGAC | 470 |
| IN-237 | CAUCAGCUUUGCUACUGUA | 471 | UACAGUAGCAAAGCUGAUGAC | 472 |
| IN-238 | CAUCAGCUUUGCUACUGUC | 473 | GACAGUAGCAAAGCUGAUGCC | 474 |
| IN-239 | GCUGAGACUCUGGCUUAUU | 475 | AAUAAGCCAGAGUCUCAGCCA | 476 |
| IN-240 | CCUGAGACUCUGGCUUAUU | 477 | AAUAAGCCAGAGUCUCAGGCA | 478 |
| IN-241 | UCUGAGACUCUGGCUUAUU | 479 | AAUAAGCCAGAGUCUCAGAUA | 480 |
| IN-242 | UCUGAGACUCUGGCUUAUU | 481 | AAUAAGCCAGAGUCUCAGAUU | 482 |
| IN-243 | UCUGAGACUCUGGCUUAUU | 483 | AAUAAGCCAGAGUCUCAGACU | 484 |
| IN-244 | GUGAAGAGACCAAGAUGAA | 485 | UUCAUCUUGGUCUCUUCACUU | 486 |
| IN-245 | CAGAGCAACAGUUCUUCAA | 487 | UUGAAGAACUGUUGCUCUGGU | 488 |
| IN-246 | CAGAGCAACAGUUCUUCAA | 489 | UUGAAGAACUGUUGCUCUGUU | 490 |
| IN-247 | CAGAGCAACAGUUCUUCAA | 491 | UUGAAGAACUGUUGCUCUGUA | 492 |
| IN-248 | GGUCAAAGCUAUUUUCAUA | 493 | UAUGAAAAUAGCUUUGACCUU | 494 |
| IN-249 | CGUCAAAGCUAUUUUCAUA | 495 | UAUGAAAAUAGCUUUGACGUU | 496 |
| IN-250 | CAUGUGAUUACAUCAUCUU | 497 | AAGAUGAUGUAAUCACAUGUU | 498 |
| IN-478 | CAUGUUAUUUGCCUUUUGA | 953 | UCAAAAGGCAAAUAACAUGUU | 954 |

TABLE 2
Sense and antisense strand sequences of modified INHBE dsRNAi agents

| | Sense Strand Sequences | SEQ | Antisense Strand Sequences | SEQ |
|---|---|---|---|---|
| Duplex | 5′ to 3′ | ID NO: | 5′ to 3′ | ID NO: |
| IN-251 | mC*mA*mGmUmCmGfUfCfCmC | 499 | mA*dG*mUmUdAmUdTmCmUmG | 500 |
| | mAmGmAmAmUmAmAmCmU | | mGdGmAfCmGmAmCmUmG*mG* | |
| | | | mU | |
| IN-252 | UCAUCAGCUUUGCUACUGU | 501 | mAfCmAfGmUfAmGfCmAmAmAf | 502 |
| | | | GmCfUmGfAmUfGmAmCmC | |
| IN-253 | UCAUCAGCUUUGCUACUGU | 503 | mAfCmAfGmUfAmGfCfAmAmAf | 504 |
| | | | GmCfUmGfAmUfGmAmCmC | |
| IN-254 | UCAUCAGCUUUGCUACUGU | 505 | mAfCmAfGmUfAmGfCmAfAmAf | 506 |
| | | | GmCfUmGfAmUfGmAmCmC | |
| IN-255 | UCAUCAGCUUUGCUACUGU | 507 | mAfCmAfGmUfAmGfCmAmAfAf | 508 |
| | | | GmCfUmGfAmUfGmAmCmC | |
| IN-256 | UCAUCAGCUUUGCUACUGU | 509 | mAmCmAfGmUfAmGfCmAmAmA | 510 |
| | | | fGmCfUmGfAmUfGmAmCmC | |
| IN-257 | UCAUCAGCUUUGCUACUGU | 511 | mAfCmAmGmUfAmGfCmAmAmA | 512 |
| | | | fGmCfUmGfAmUfGmAmCmC | |
| IN-258 | UCAUCAGCUUUGCUACUGU | 513 | mAfCmAfGmUmAmGfCmAmAmA | 514 |
| | | | fGmCfUmGfAmUfGmAmCmC | |
| IN-259 | UCAUCAGCUUUGCUACUGU | 515 | mAfCmAfGmUfAmGmCmAmAmA | 516 |
| | | | fGmCfUmGfAmUfGmAmCmC | |
| IN-260 | UCAUCAGCUUUGCUACUGU | 517 | mAfCmAfGmUfAmGfCmAmAmA | 518 |
| | | | mGmCfUmGfAmUfGmAmCmC | |
| IN-261 | UCAUCAGCUUUGCUACUGU | 519 | mAfCmAfGmUfAmGfCmAmAmAf | 520 |
| | | | GmCmUmGfAmUfGmAmCmC | |
| IN-262 | UCAUCAGCUUUGCUACUGU | 521 | mAfCmAfGmUfAmGfCmAmAmAf | 522 |
| | | | GmCfUmGmAmUfGmAmCmC | |
| IN-263 | UCAUCAGCUUUGCUACUGU | 523 | mAfCmAfGmUfAmGfCmAmAmAf | 524 |
| | | | GmCfUmGfAmUmGmAmCmC | |
| IN-264 | UCAUCAGCUUUGCUACUGU | 525 | mA*fCmAfGmUfAmGfCmAmAmA | 526 |
| | | | fGmCfUmGfAmUfGmAmC*mC | |
| IN-265 | UCAUCAGCUUUGCUACUGU | 527 | mA*fC*mAfGmUfAmGfCmAmAm | 528 |
| | | | AfGmCfUmGfAmUfGmA*mC*mC | |
| IN-266 | UCAUCAGCUUUGCUACUGU | 529 | mAdCmAfGdUfAdGfCmAmAmAd | 530 |
| | | | GmCfUmGfAmUfGmAmCmC | |
| IN-267 | UCAUCAGCUUUGCUACUGU | 531 | mAfCmAfImUfAmGfCmAmAmAf | 532 |
| | | | GmCfUmGfAmUfGmAmCmC | |
| IN-268 | UCAUCAGCUUUGCUACUGU | 533 | mAfCmAfGmUfAmIfCmAmAmAf | 534 |
| | | | GmCfUmGfAmUfGmAmCmC | |
| IN-269 | mUmCmAmUfCfAfGfCfUfUmUm | 535 | ACAGUAGCAAAGCUGAUGACC | 536 |
| | GmCmUmAmCmUmGmU | | | |
| IN-270 | mUmCmAmUmCfAfGfCfUfUmU | 537 | ACAGUAGCAAAGCUGAUGACC | 538 |
| | mGmCmUmAmCmUmGmU | | | |
| IN-271 | mUmCmAmUmCmAfGfCfUfUm | 539 | ACAGUAGCAAAGCUGAUGACC | 540 |
| | UmGmCmUmAmCmUmGmU | | | |
| IN-272 | mUmCmAmUmCmAmGfCfUfUm | 541 | ACAGUAGCAAAGCUGAUGACC | 542 |
| | UmGmCmUmAmCmUmGmU | | | |
| IN-273 | mUmCmAmUfCmAmGmCfUfUm | 543 | ACAGUAGCAAAGCUGAUGACC | 544 |
| | UmGmCmUmAmCmUmGmU | | | |
| IN-274 | mUmCmAmUfCfAmGmCmUfUm | 545 | ACAGUAGCAAAGCUGAUGACC | 546 |
| | UmGmCmUmAmCmUmGmU | | | |
| IN-275 | mUmCmAmUfCfAfGmCmUmUm | 547 | ACAGUAGCAAAGCUGAUGACC | 548 |
| | UmGmCmUmAmCmUmGmU | | | |
| IN-276 | mUmCmAmUfCfAfGfCmUmUm | 549 | ACAGUAGCAAAGCUGAUGACC | 550 |
| | UmGmCmUmAmCmUmGmU | | | |
| IN-277 | mUmCmAmUfCfAfGfCfUmUmU | 551 | ACAGUAGCAAAGCUGAUGACC | 552 |
| | mGmCmUmAmCmUmGmU | | | |
| IN-278 | mU*mCmAmUfCfAfGfCfUfUmU | 553 | ACAGUAGCAAAGCUGAUGACC | 554 |
| | mGmCmUmAmCmUmGmU | | | |
| IN-279 | mU*mC*mAmUfCfAfGfCfUfUm | 555 | ACAGUAGCAAAGCUGAUGACC | 556 |
| | UmGmCmUmAmCmUmGmU | | | |
| IN-280 | CAUCAGCUUUGCUACUGUC | 557 | mGfAmCfAmGfUmAfGmCmAmAf | 558 |
| | | | AmGfCmUfGmAfUmGmAmC | |
| IN-281 | mCmAmUmCfAfGfCfUfUfUmGm | 559 | GACAGUAGCAAAGCUGAUGAC | 560 |
| | CmUmAmCmUmGmUmC | | | |
| IN-282 | mUmCmAmUfCfAfGfCfUfUmUm | 561 | ACAGUAGCAAAGCUGAUGACC | 562 |
| | GmCmUmAmCmUmGirU | | | |
| IN-283 | mCmAmUmCfAfGfCfUfUfUmGm | 563 | GACAGUAGCAAAGCUGAUGAC | 564 |
| | CmUmAmCmUmGmUirC | | | |
| IN-284 | mU*mC*mAmUfCfAfGfCfUfUm | 565 | mA*fC*mAfGmUfAmGfCmAmAm | 566 |
| | UmGmCmUmAmCmUmGmU | | AfGmCfUmGfAmUfGmA*mC*mC | |
| IN-285 | irdTmCmAmUfCfAfGfCfUfUmU | 567 | ACAGUAGCAAAGCUGAUGACC | 568 |
| | mGmCmUmAmCmUmGmU | | | |
| IN-286 | UCUGAGACUCUGGCUUAUU | 569 | mAfAmUfAmAfGmCfCmAmGmAf | 570 |
| | | | GmUfCmUfCmAfGmAmCmA | |
| IN-287 | UCUGAGACUCUGGCUUAUU | 571 | mAfAmUfAmAfGmCfCfAmGmAf | 572 |
| | | | GmUfCmUfCmAfGmAmCmA | |
| IN-288 | UCUGAGACUCUGGCUUAUU | 573 | mAfAmUfAmAfGmCfCmAfGmAf | 574 |
| | | | GmUfCmUfCmAfGmAmCmA | |
| IN-289 | UCUGAGACUCUGGCUUAUU | 575 | mAfAmUfAmAfGmCfCmAmGfAf | 576 |
| | | | GmUfCmUfCmAfGmAmCmA | |
| IN-290 | UCUGAGACUCUGGCUUAUU | 577 | mAmAmUfAmAfGmCfCmAmGmA | 578 |
| | | | fGmUfCmUfCmAfGmAmCmA | |
| IN-291 | UCUGAGACUCUGGCUUAUU | 579 | mAfAmUmAmAfGmCfCmAmGmA | 580 |
| | | | fGmUfCmUfCmAfGmAmCmA | |
| IN-292 | UCUGAGACUCUGGCUUAUU | 581 | mAfAmUfAmAmGmCfCmAmGmA | 582 |
| | | | fGmUfCmUfCmAfGmAmCmA | |
| IN-293 | UCUGAGACUCUGGCUUAUU | 583 | mAfAmUfAmAfGmCmCmAmGmA | 584 |
| | | | fGmUfCmUfCmAfGmAmCmA | |
| IN-294 | UCUGAGACUCUGGCUUAUU | 585 | mAfAmUfAmAfGmCfCmAmGmA | 586 |
| | | | mGmUfCmUfCmAfGmAmCmA | |
| IN-295 | UCUGAGACUCUGGCUUAUU | 587 | mAfAmUfAmAfGmCfCmAmGmAf | 588 |
| | | | GmUmCmUfCmAfGmAmCmA | |
| IN-296 | UCUGAGACUCUGGCUUAUU | 589 | mAfAmUfAmAfGmCfCmAmGmAf | 590 |
| | | | GmUfCmUmCmAfGmAmCmA | |
| IN-297 | UCUGAGACUCUGGCUUAUU | 591 | mAfAmUfAmAfGmCfCmAmGmAf | 592 |
| | | | GmUfCmUfCmAmGmAmCmA | |
| IN-298 | UCUGAGACUCUGGCUUAUU | 593 | mA*fAmUfAmAfGmCfCmAmGmA | 594 |
| | | | fGmUfCmUfCmAfGmAmC*mA | |
| IN-299 | UCUGAGACUCUGGCUUAUU | 595 | mA*fA*mUfAmAfGmCfCmAmGm | 596 |
| | | | AfGmUfCmUfCmAfGmA*mC*mA | |
| IN-300 | UCUGAGACUCUGGCUUAUU | 597 | mAdAmUfAdAfGdCfCmAmGmAd | 598 |
| | | | GmUfCmUfCmAfGmAmCmA | |
| IN-301 | UCUGAGACUCUGGCUUAUU | 599 | mAfAmUfAmAfImCfCmAmGmAf | 600 |
| | | | GmUfCmUfCmAfGmAmCmA | |
| IN-302 | mUmCmUmGfAfGfAfCfUfCmUm | 601 | AAUAAGCCAGAGUCUCAGACA | 602 |
| | GmGmCmUmUmAmUmU | | | |
| IN-303 | mUmCmUmGmAfGfAfCfUfCmU | 603 | AAUAAGCCAGAGUCUCAGACA | 604 |
| | mGmGmCmUmUmAmUmU | | | |
| IN-304 | mUmCmUmGmAmGfAfCfUfCm | 605 | AAUAAGCCAGAGUCUCAGACA | 606 |
| | UmGmGmCmUmUmAmUmU | | | |
| IN-305 | mUmCmUmGmAmGmAfCfUfCm | 607 | AAUAAGCCAGAGUCUCAGACA | 608 |
| | UmGmGmCmUmUmAmUmU | | | |
| IN-306 | mUmCmUmGfAmGmAmCfUfCm | 609 | AAUAAGCCAGAGUCUCAGACA | 610 |
| | UmGmGmCmUmUmAmUmU | | | |
| IN-307 | mUmCmUmGfAfGmAmCmUfCm | 611 | AAUAAGCCAGAGUCUCAGACA | 612 |
| | UmGmGmCmUmUmAmUmU | | | |
| IN-308 | mUmCmUmGfAfGfAmCmUmCm | 613 | AAUAAGCCAGAGUCUCAGACA | 614 |
| | UmGmGmCmUmUmAmUmU | | | |
| IN-309 | mUmCmUmGfAfGfAfCmUmCm | 615 | AAUAAGCCAGAGUCUCAGACA | 616 |
| | UmGmGmCmUmUmAmUmU | | | |
| IN-310 | mUmCmUmGfAfGfAfCfUmCmU | 617 | AAUAAGCCAGAGUCUCAGACA | 618 |
| | mGmGmCmUmUmAmUmU | | | |
| IN-311 | mU*mCmUmGfAfGfAfCfUfCmU | 619 | AAUAAGCCAGAGUCUCAGACA | 620 |
| | mGmGmCmUmUmAmUmU | | | |
| IN-312 | mU*mC*mUmGfAfGfAfCfUfCm | 621 | AAUAAGCCAGAGUCUCAGACA | 622 |
| | UmGmGmCmUmUmAmUmU | | | |
| IN-313 | mUmCmUmGfAfGfAfCfUfCmUm | 623 | AAUAAGCCAGAGUCUCAGACA | 624 |
| | GmGmCmUmUmAmUirdT | | | |
| IN-314 | mU*mC*mUmGfAfGfAfCfUfCm | 625 | mA*fA*mUfAmAfGmCfCmAmGm | 626 |
| | UmGmGmCmUmUmAmUmU | | AfGmUfCmUfCmAfGmA*mC*mA | |
| IN-315 | irdTmCmUmGfAfGfAfCfUfCmU | 627 | AAUAAGCCAGAGUCUCAGACA | 628 |
| | mGmGmCmUmUmAmUmU | | | |
| IN-316 | GUGAAGAGACCAAGAUGAA | 629 | mUfUmCfAmUfCmUfUmGmGmUf | 630 |
| | | | CmUfCmUfUmCfAmCmUmC | |
| IN-317 | GUGAAGAGACCAAGAUGAA | 631 | mUfUmCfAmUfCmUfUfGmGmUfC | 632 |
| | | | mUfCmUfUmCfAmCmUmC | |
| IN-318 | GUGAAGAGACCAAGAUGAA | 633 | mUfUmCfAmUfCmUfUmGfGmUfC | 634 |
| | | | mUfCmUfUmCfAmCmUmC | |
| IN-319 | GUGAAGAGACCAAGAUGAA | 635 | mUfUmCfAmUfCmUfUmGmGfUfC | 636 |
| | | | mUfCmUfUmCfAmCmUmC | |
| IN-320 | GUGAAGAGACCAAGAUGAA | 637 | mUmUmCfAmUfCmUfUmGmGmU | 638 |
| | | | fCmUfCmUfUmCfAmCmUmC | |
| IN-321 | GUGAAGAGACCAAGAUGAA | 639 | mUfUmCmAmUfCmUfUmGmGmU | 640 |
| | | | fCmUfCmUfUmCfAmCmUmC | |
| IN-322 | GUGAAGAGACCAAGAUGAA | 641 | mUfUmCfAmUmCmUfUmGmGmU | 642 |
| | | | fCmUfCmUfUmCfAmCmUmC | |
| IN-323 | GUGAAGAGACCAAGAUGAA | 643 | mUfUmCfAmUfCmUmUmGmGmU | 644 |
| | | | fCmUfCmUfUmCfAmCmUmC | |
| IN-324 | GUGAAGAGACCAAGAUGAA | 645 | mUfUmCfAmUfCmUfUmGmGmU | 646 |
| | | | mCmUfCmUfUmCfAmCmUmC | |
| IN-325 | GUGAAGAGACCAAGAUGAA | 647 | mUfUmCfAmUfCmUfUmGmGmUf | 648 |
| | | | CmUmCmUfUmCfAmCmUmC | |
| IN-326 | GUGAAGAGACCAAGAUGAA | 649 | mUfUmCfAmUfCmUfUmGmGmUf | 650 |
| | | | CmUfCmUmUmCfAmCmUmC | |
| IN-327 | GUGAAGAGACCAAGAUGAA | 651 | mUfUmCfAmUfCmUfUmGmGmUf | 652 |
| | | | CmUfCmUfUmCmAmCmUmC | |
| IN-328 | GUGAAGAGACCAAGAUGAA | 653 | mU*fUmCfAmUfCmUfUmGmGmU | 654 |
| | | | fCmUfCmUfUmCfAmCmU*mC | |
| IN-329 | GUGAAGAGACCAAGAUGAA | 655 | mU*fU*mCfAmUfCmUfUmGmGm | 656 |
| | | | UfCmUfCmUfUmCfAmC*mU*mC | |
| IN-330 | GUGAAGAGACCAAGAUGAA | 657 | mUdUmCfAdUfCdUfUmGmGmUd | 658 |
| | | | CmUfCmUfUmCfAmCmUmC | |
| IN-331 | mGmUmGmAfAfGfAfGfAfCmC | 659 | UUCAUCUUGGUCUCUUCACUU | 660 |
| | mAmAmGmAmUmGmAmA | | | |
| IN-332 | mGmUmGmAmAfGfAfGfAfCmC | 661 | UUCAUCUUGGUCUCUUCACUU | 662 |
| | mAmAmGmAmUmGmAmA | | | |
| IN-333 | mGmUmGmAmAmGfAfGfAfCm | 663 | UUCAUCUUGGUCUCUUCACUU | 664 |
| | CmAmAmGmAmUmGmAmA | | | |
| IN-334 | mGmUmGmAmAmGmAfGfAfCm | 665 | UUCAUCUUGGUCUCUUCACUU | 666 |
| | CmAmAmGmAmUmGmAmA | | | |
| IN-335 | mGmUmGmAfAmGmAmGfAfCm | 667 | UUCAUCUUGGUCUCUUCACUU | 668 |
| | CmAmAmGmAmUmGmAmA | | | |
| IN-336 | mGmUmGmAfAfGmAmGmAfCm | 669 | UUCAUCUUGGUCUCUUCACUU | 670 |
| | CmAmAmGmAmUmGmAmA | | | |
| IN-337 | mGmUmGmAfAfGfAmGmAmCm | 671 | UUCAUCUUGGUCUCUUCACUU | 672 |
| | CmAmAmGmAmUmGmAmA | | | |
| IN-338 | mGmUmGmAfAfGfAfGmAmCm | 673 | UUCAUCUUGGUCUCUUCACUU | 674 |
| | CmAmAmGmAmUmGmAmA | | | |
| IN-339 | mGmUmGmAfAfGfAfGfAmCmC | 675 | UUCAUCUUGGUCUCUUCACUU | 676 |
| | mAmAmGmAmUmGmAmA | | | |
| IN-340 | mG*mUmGmAfAfGfAfGfAfCmC | 677 | UUCAUCUUGGUCUCUUCACUU | 678 |
| | mAmAmGmAmUmGmAmA | | | |
| IN-341 | mG*mU*mGmAfAfGfAfGfAfCm | 679 | UUCAUCUUGGUCUCUUCACUU | 680 |
| | CmAmAmGmAmUmGmAmA | | | |
| IN-342 | mG*mU*mGmAfAfGfAfGfAfCm | 681 | mU*fU*mCfAmUfCmUfUmGmGm | 682 |
| | CmAmAmGmAmUmGmAmA | | UfCmUfCmUfUmCfAmC*mU*mC | |
| IN-343 | irdAmGmUmGmAfAfGfAfGfAfC | 683 | UUCAUCUUGGUCUCUUCACUU | 684 |
| | mCmAmAmGmAmUmGmAmA | | | |
| IN-344 | irdAmUmGmAfAfGfAfGfAfCmC | 685 | UUCAUCUUGGUCUCUUCAUUU | 686 |
| | mAmAmGmAmUmGmAmA | | | |
| IN-345 | CAGAGCAACAGUUCUUCAA | 687 | mUfUmGfAmAfGmAfAmCmUmGf | 688 |
| | | | UmUfGmCfUmCfUmGmGmA | |
| IN-346 | CAGAGCAACAGUUCUUCAA | 689 | mUfUmGfAmAfGmAfAfCmUmGf | 690 |
| | | | UmUfGmCfUmCfUmGmGmA | |
| IN-347 | CAGAGCAACAGUUCUUCAA | 691 | mUfUmGfAmAfGmAfAmCfUmGf | 692 |
| | | | UmUfGmCfUmCfUmGmGmA | |
| IN-348 | CAGAGCAACAGUUCUUCAA | 693 | mUfUmGfAmAfGmAfAmCmUfGf | 694 |
| | | | UmUfGmCfUmCfUmGmGmA | |
| IN-349 | CAGAGCAACAGUUCUUCAA | 695 | mUmUmGfAmAfGmAfAmCmUmG | 696 |
| | | | fUmUfGmCfUmCfUmGmGmA | |
| IN-350 | CAGAGCAACAGUUCUUCAA | 697 | mUfUmGmAmAfGmAfAmCmUmG | 698 |
| | | | fUmUfGmCfUmCfUmGmGmA | |
| IN-351 | CAGAGCAACAGUUCUUCAA | 699 | mUfUmGfAmAmGmAfAmCmUmG | 700 |
| | | | fUmUfGmCfUmCfUmGmGmA | |
| IN-352 | CAGAGCAACAGUUCUUCAA | 701 | mUfUmGfAmAfGmAmAmCmUmG | 702 |
| | | | fUmUfGmCfUmCfUmGmGmA | |
| IN-353 | CAGAGCAACAGUUCUUCAA | 703 | mUfUmGfAmAfGmAfAmCmUmG | 704 |
| | | | mUmUfGmCfUmCfUmGmGmA | |
| IN-354 | CAGAGCAACAGUUCUUCAA | 705 | mUfUmGfAmAfGmAfAmCmUmGf | 706 |
| | | | UmUmGmCfUmCfUmGmGmA | |
| IN-355 | CAGAGCAACAGUUCUUCAA | 707 | mUfUmGfAmAfGmAfAmCmUmGf | 708 |
| | | | UmUfGmCmUmCfUmGmGmA | |
| IN-356 | CAGAGCAACAGUUCUUCAA | 709 | mUfUmGfAmAfGmAfAmCmUmGf | 710 |
| | | | UmUfGmCfUmCmUmGmGmA | |
| IN-357 | CAGAGCAACAGUUCUUCAA | 711 | mU*fUmGfAmAfGmAfAmCmUmG | 712 |
| | | | fUmUfGmCfUmCfUmGmG*mA | |
| IN-358 | CAGAGCAACAGUUCUUCAA | 713 | mU*fU*mGfAmAfGmAfAmCmUm | 714 |
| | | | GfUmUfGmCfUmCfUmG*mG*mA | |
| IN-359 | CAGAGCAACAGUUCUUCAA | 715 | mUdTmGfAdAfGdAfAmCmUmGd | 716 |
| | | | TmUfGmCfUmCfUmGmGmA | |
| IN-360 | CAGAGCAACAGUUCUUCAA | 717 | mUfUmIfAmAfGmAfAmCmUmGf | 718 |
| | | | UmUfGmCfUmCfUmGmGmA | |
| IN-361 | CAGAGCAACAGUUCUUCAA | 719 | mUfUmGfAmAfImAfAmCmUmGf | 720 |
| | | | UmUfGmCfUmCfUmGmGmA | |
| IN-362 | mCmAmGmAfGfCfAfAfCfAmGm | 721 | UUGAAGAACUGUUGCUCUGGA | 722 |
| | UmUmCmUmUmCmAmA | | | |
| IN-363 | mCmAmGmAmGfCfAfAfCfAmG | 723 | UUGAAGAACUGUUGCUCUGGA | 724 |
| | mUmUmCmUmUmCmAmA | | | |
| IN-364 | mCmAmGmAmGmCfAfAfCfAm | 725 | UUGAAGAACUGUUGCUCUGGA | 726 |
| | GmUmUmCmUmUmCmAmA | | | |
| IN-365 | mCmAmGmAmGmCmAfAfCfAm | 727 | UUGAAGAACUGUUGCUCUGGA | 728 |
| | GmUmUmCmUmUmCmAmA | | | |
| IN-366 | mCmAmGmAfGmCmAmAfCfAm | 729 | UUGAAGAACUGUUGCUCUGGA | 730 |
| | GmUmUmCmUmUmCmAmA | | | |
| IN-367 | mCmAmGmAfGfCmAmAmCfAm | 731 | UUGAAGAACUGUUGCUCUGGA | 732 |
| | GmUmUmCmUmUmCmAmA | | | |
| IN-368 | mCmAmGmAfGfCfAmAmCmAm | 733 | UUGAAGAACUGUUGCUCUGGA | 734 |
| | GmUmUmCmUmUmCmAmA | | | |
| IN-369 | mCmAmGmAfGfCfAfAmCmAm | 735 | UUGAAGAACUGUUGCUCUGGA | 736 |
| | GmUmUmCmUmUmCmAmA | | | |
| IN-370 | mCmAmGmAfGfCfAfAfCmAmG | 737 | UUGAAGAACUGUUGCUCUGGA | 738 |
| | mUmUmCmUmUmCmAmA | | | |
| IN-371 | mC*mAmGmAfGfCfAfAfCfAmG | 739 | UUGAAGAACUGUUGCUCUGGA | 740 |
| | mUmUmCmUmUmCmAmA | | | |
| IN-372 | mC*mA*mGmAfGfCfAfAfCfAm | 741 | UUGAAGAACUGUUGCUCUGGA | 742 |
| | GmUmUmCmUmUmCmAmA | | | |
| IN-373 | mC*mA*mGmAfGfCfAfAfCfAm | 743 | mU*fU*mGfAmAfGmAfAmCmUm | 744 |
| | GmUmUmCmUmUmCmAmA | | GfUmUfGmCfUmCfUmG*mG*mA | |
| IN-374 | AGUCAAAGCUAUUUUCAUA | 745 | mUfAmUfGmAfAmAfAmUmAmGf | 746 |
| | | | CmUfUmUfGmAfCmGmUmU | |
| IN-375 | AGUCAAAGCUAUUUUCAUA | 747 | mUfAmUfGmAfAmAfAfUmAmGf | 748 |
| | | | CmUfUmUfGmAfCmGmUmU | |
| IN-376 | AGUCAAAGCUAUUUUCAUA | 749 | mUfAmUfGmAfAmAfAmUfAmGf | 750 |
| | | | CmUfUmUfGmAfCmGmUmU | |
| IN-377 | AGUCAAAGCUAUUUUCAUA | 751 | mUfAmUfGmAfAmAfAmUmAfGf | 752 |
| | | | CmUfUmUfGmAfCmGmUmU | |
| IN-378 | AGUCAAAGCUAUUUUCAUA | 753 | mUmAmUfGmAfAmAfAmUmAmG | 754 |
| | | | fCmUfUmUfGmAfCmGmUmU | |
| IN-379 | AGUCAAAGCUAUUUUCAUA | 755 | mUfAmUmGmAfAmAfAmUmAmG | 756 |
| | | | fCmUfUmUfGmAfCmGmUmU | |
| IN-380 | AGUCAAAGCUAUUUUCAUA | 757 | mUfAmUfGmAmAmAfAmUmAmG | 758 |
| | | | fCmUfUmUfGmAfCmGmUmU | |
| IN-381 | AGUCAAAGCUAUUUUCAUA | 759 | mUfAmUfGmAfAmAmAmUmAmG | 760 |
| | | | fCmUfUmUfGmAfCmGmUmU | |
| IN-382 | AGUCAAAGCUAUUUUCAUA | 761 | mUfAmUfGmAfAmAfAmUmAmG | 762 |
| | | | mCmUfUmUfGmAfCmGmUmU | |
| IN-383 | AGUCAAAGCUAUUUUCAUA | 763 | mUfAmUfGmAfAmAfAmUmAmGf | 764 |
| | | | CmUmUmUfGmAfCmGmUmU | |
| IN-384 | AGUCAAAGCUAUUUUCAUA | 765 | mUfAmUfGmAfAmAfAmUmAmGf | 766 |
| | | | CmUfUmUmGmAfCmGmUmU | |
| IN-385 | AGUCAAAGCUAUUUUCAUA | 767 | mUfAmUfGmAfAmAfAmUmAmGf | 768 |
| | | | CmUfUmUfGmAmCmGmUmU | |
| IN-386 | AGUCAAAGCUAUUUUCAUA | 769 | mU*fAmUfGmAfAmAfAmUmAm | 770 |
| | | | GfCmUfUmUfGmAfCmGmU*mU | |
| IN-387 | AGUCAAAGCUAUUUUCAUA | 771 | mU*fA*mUfGmAfAmAfAmUmAm | 772 |
| | | | GfCmUfUmUfGmAfCmG*mU*mU | |
| IN-388 | AGUCAAAGCUAUUUUCAUA | 773 | mUdAmUfGdAfAdAfAmUmAmGd | 774 |
| | | | CmUfUmUfGmAfCmGmUmU | |
| IN-389 | AGUCAAAGCUAUUUUCAUA | 775 | mUfAmUfImAfAmAfAmUmAmGf | 776 |
| | | | CmUfUmUfGmAfCmGmUmU | |
| IN-390 | mAmGmUmCfAfAfAfGfCfUmA | 777 | UAUGAAAAUAGCUUUGACUUU | 778 |
| | mUmUmUmUmCmAmUmA | | | |
| IN-391 | mAmGmUmCmAfAfAfGfCfUmA | 779 | UAUGAAAAUAGCUUUGACUUU | 780 |
| | mUmUmUmUmCmAmUmA | | | |
| IN-392 | mAmGmUmCmAmAfAfGfCfUm | 781 | UAUGAAAAUAGCUUUGACUUU | 782 |
| | AmUmUmUmUmCmAmUmA | | | |
| IN-393 | mAmGmUmCmAmAmAfGfCfUm | 783 | UAUGAAAAUAGCUUUGACUUU | 784 |
| | AmUmUmUmUmCmAmUmA | | | |
| IN-394 | mAmGmUmCfAmAmAmGfCfUm | 785 | UAUGAAAAUAGCUUUGACUUU | 786 |
| | AmUmUmUmUmCmAmUmA | | | |
| IN-395 | mAmGmUmCfAfAmAmGmCfUm | 787 | UAUGAAAAUAGCUUUGACUUU | 788 |
| | AmUmUmUmUmCmAmUmA | | | |
| IN-396 | mAmGmUmCfAfAfAmGmCmUm | 789 | UAUGAAAAUAGCUUUGACUUU | 790 |
| | AmUmUmUmUmCmAmUmA | | | |
| IN-397 | mAmGmUmCfAfAfAfGmCmUm | 791 | UAUGAAAAUAGCUUUGACUUU | 792 |
| | AmUmUmUmUmCmAmUmA | | | |
| IN-398 | mAmGmUmCfAfAfAfGfCmUmA | 793 | UAUGAAAAUAGCUUUGACUUU | 794 |
| | mUmUmUmUmCmAmUmA | | | |
| IN-399 | mA*mGmUmCfAfAfAfGfCfUmA | 795 | UAUGAAAAUAGCUUUGACUUU | 796 |
| | mUmUmUmUmCmAmUmA | | | |
| IN-400 | mA*mG*mUmCfAfAfAfGfCfUm | 797 | UAUGAAAAUAGCUUUGACUUU | 798 |
| | AmUmUmUmUmCmAmUmA | | | |
| IN-401 | mA*mG*mUmCfAfAfAfGfCfUm | 799 | mU*fA*mUfGmAfAmAfAmUmAm | 800 |
| | AmUmUmUmUmCmAmUmA | | GfCmUfUmUfGmAfCmG*mU*mU | |
| IN-402 | CAUGUGAUUACAUCAUCUU | 801 | mAfAmGfAmUfGmAfUmGmUmAf | 802 |
| | | | AmUfCmAfCmAfUmGmUmC | |
| IN-403 | CAUGUGAUUACAUCAUCUU | 803 | mAfAmGfAmUfGmAfUfGmUmAf | 804 |
| | | | AmUfCmAfCmAfUmGmUmC | |
| IN-404 | CAUGUGAUUACAUCAUCUU | 805 | mAfAmGfAmUfGmAfUmGfUmAf | 806 |
| | | | AmUfCmAfCmAfUmGmUmC | |
| IN-405 | CAUGUGAUUACAUCAUCUU | 807 | mAfAmGfAmUfGmAfUmGmUfAf | 808 |
| | | | AmUfCmAfCmAfUmGmUmC | |
| IN-406 | CAUGUGAUUACAUCAUCUU | 809 | mAmAmGfAmUfGmAfUmGmUmA | 810 |
| | | | fAmUfCmAfCmAfUmGmUmC | |
| IN-407 | CAUGUGAUUACAUCAUCUU | 811 | mAfAmGmAmUfGmAfUmGmUmA | 812 |
| | | | fAmUfCmAfCmAfUmGmUmC | |
| IN-408 | CAUGUGAUUACAUCAUCUU | 813 | mAfAmGfAmUmGmAfUmGmUmA | 814 |
| | | | fAmUfCmAfCmAfUmGmUmC | |
| IN-409 | CAUGUGAUUACAUCAUCUU | 815 | mAfAmGfAmUfGmAmUmGmUmA | 816 |
| | | | fAmUfCmAfCmAfUmGmUmC | |
| IN-410 | CAUGUGAUUACAUCAUCUU | 817 | mAfAmGfAmUfGmAfUmGmUmA | 818 |
| | | | mAmUfCmAfCmAfUmGmUmC | |
| IN-411 | CAUGUGAUUACAUCAUCUU | 819 | mAfAmGfAmUfGmAfUmGmUmAf | 820 |
| | | | AmUmCmAfCmAfUmGmUmC | |
| IN-412 | CAUGUGAUUACAUCAUCUU | 821 | mAfAmGfAmUfGmAfUmGmUmAf | 822 |
| | | | AmUfCmAmCmAfUmGmUmC | |
| IN-413 | CAUGUGAUUACAUCAUCUU | 823 | mAfAmGfAmUfGmAfUmGmUmAf | 824 |
| | | | AmUfCmAfCmAmUmGmUmC | |
| IN-414 | CAUGUGAUUACAUCAUCUU | 825 | mA*fAmGfAmUfGmAfUmGmUm | 826 |
| | | | AfAmUfCmAfCmAfUmGmU*mC | |
| IN-415 | CAUGUGAUUACAUCAUCUU | 827 | mA*fA*mGfAmUfGmAfUmGmUm | 828 |
| | | | AfAmUfCmAfCmAfUmG*mU*mC | |
| IN-416 | CAUGUGAUUACAUCAUCUU | 829 | mAdAmGfAdUfGdAfUmGmUmAd | 830 |
| | | | AmUfCmAfCmAfUmGmUmC | |
| IN-417 | CAUGUGAUUACAUCAUCUU | 831 | mAfAmIfAmUfGmAfUmGmUmAf | 832 |
| | | | AmUfCmAfCmAfUmGmUmC | |
| IN-418 | CAUGUGAUUACAUCAUCUU | 833 | mAfAmGfAmUfImAfUmGmUmAf | 834 |
| | | | AmUfCmAfCmAfUmGmUmC | |
| IN-419 | mCmAmUmGfUfGfAfUfUfAmC | 835 | AAGAUGAUGUAAUCACAUGUC | 836 |
| | mAmUmCmAmUmCmUmU | | | |
| IN-420 | mCmAmUmGmUfGfAfUfUfAmC | 837 | AAGAUGAUGUAAUCACAUGUC | 838 |
| | mAmUmCmAmUmCmUmU | | | |
| IN-421 | mCmAmUmGmUmGfAfUfUfAm | 839 | AAGAUGAUGUAAUCACAUGUC | 840 |
| | CmAmUmCmAmUmCmUmU | | | |
| IN-422 | mCmAmUmGmUmGmAfUfUfAm | 841 | AAGAUGAUGUAAUCACAUGUC | 842 |
| | CmAmUmCmAmUmCmUmU | | | |
| IN-423 | mCmAmUmGfUmGmAmUfUfAm | 843 | AAGAUGAUGUAAUCACAUGUC | 844 |
| | CmAmUmCmAmUmCmUmU | | | |
| IN-424 | mCmAmUmGfUfGmAmUmUfAm | 845 | AAGAUGAUGUAAUCACAUGUC | 846 |
| | CmAmUmCmAmUmCmUmU | | | |
| IN-425 | mCmAmUmGfUfGfAmUmUmAm | 847 | AAGAUGAUGUAAUCACAUGUC | 848 |
| | CmAmUmCmAmUmCmUmU | | | |
| IN-426 | mCmAmUmGfUfGfAfUmUmAm | 849 | AAGAUGAUGUAAUCACAUGUC | 850 |
| | CmAmUmCmAmUmCmUmU | | | |
| IN-427 | mCmAmUmGfUfGfAfUfUmAmC | 851 | AAGAUGAUGUAAUCACAUGUC | 852 |
| | mAmUmCmAmUmCmUmU | | | |
| IN-428 | mC*mAmUmGfUfGfAfUfUfAmC | 853 | AAGAUGAUGUAAUCACAUGUC | 854 |
| | mAmUmCmAmUmCmUmU | | | |
| IN-429 | mC*mA*mUmGfUfGfAfUfUfAm | 855 | AAGAUGAUGUAAUCACAUGUC | 856 |
| | CmAmUmCmAmUmCmUmU | | | |
| IN-430 | mC*mA*mUmGfUfGfAfUfUfAm | 857 | mA*fA*mGfAmUfGmAfUmGmUm | 858 |
| | CmAmUmCmAmUmCmUmU | | AfAmUfCmAfCmAfUmG*mU*mC | |
| IN-431 | mG*mC*mUmGmAmGfAfCfUm | 859 | mA*fA*mUmAmAmGmCmCmAm | 860 |
| | CmUmGmGmCmUmUmAmUmU | | GmAmGmUfCmUmCmAmGmC*m | |
| | | | C*mA | |
| IN-432 | mG*mC*mUmGmAmGfAfCfUm | 861 | mA*fA*mUmAmAmGmCmCmAfG | 862 |
| | CmUmGmGmCmUmUmAmUmU | | mAmGmUfCmUmCmAmGmC*mC | |
| | | | *mA | |
| IN-433 | mG*mC*mUmGmAmGfAfCfUm | 863 | mA*fA*mUmAmAmGmCmCmAm | 864 |
| | CmUmGmGmCmUmUmAmUmU | | GmAmGmUfCmUmCmAmGmG*m | |
| | | | C*mA | |
| IN-434 | irmG*mC*mUmGmAmGfAfCfUm | 865 | mA*fA*mUmAmAmGmCmCmAm | 866 |
| | CmUmGmGmCmUmUmAmUmU | | GmAmGmUfCmUmCmAmGmC*m | |
| | | | C*mA | |
| IN-435 | mC*mC*mAmUmCmAfGfCfUmU | 867 | mA*fC*mAmGmUmAmGmCfAmA | 868 |
| | mUmGmCmUmAmCmUmGmU | | mAfGmCfUmGmAmUmGmG*mU* | |
| | | | mU | |
| IN-436 | mC*mC*mAmUmCmAfGfCfUmU | 869 | mA*fC*mAmGmUmAmGmCfAmA | 870 |
| | mUmGmCmUmAmCmUmGmU | | mAfGmCmUmGmAmUmGmG*mU | |
| | | | *mU | |
| IN-437 | mC*mC*mAmUmCmAfGfCfUmU | 871 | mA*fC*mAmGmUmAmGfCfAmA | 872 |
| | mUmGmCmUmAmCmUmGmU | | mAfGmCfUmGmAmUmGmG*mU* | |
| | | | mU | |
| IN-438 | mC*mC*mAmUmCmAfGfCfUmU | 873 | mA*fC*mAmGmUmAmGfCfAmA | 874 |
| | mUmGmCmUmAmCmUmGmU | | mAfGmCmUmGmAmUmGmG*mU | |
| | | | *mU | |
| IN-439 | mC*mA*mUmGfUfGfAmUmUm | 875 | mA*fA*mGmAmUmImAmUmGmU | 876 |
| | AmCmAmUmCmAmUmCmUmU | | fAmAmUmCmAmCmAmUmG*mU | |
| | | | *mC | |
| IN-440 | mC*mA*mUmGfUfGfAmUmUm | 877 | mA*fA*mGmAfUmImAmUmGmUf | 878 |
| | AmCmAmUmCmAmUmCmUmU | | AmAmUmCmAmCmAmUmG*mU* | |
| | | | mC | |
| IN-441 | mC*mA*mUmGfUfGfAmUmUm | 879 | mA*fA*mGmAfUmIfAmUmGmUf | 880 |
| | AmCmAmUmCmAmUmCmUmU | | AmAmUmCmAmCmAmUmG*mU* | |
| | | | mC | |
| IN-442 | mC*mA*mUmGfUfGfAmUmUm | 881 | mA*dA*mGmAdUmIdAmUmGmUf | 882 |
| | AmCmAmUmCmAmUmCmUmU | | AdAmUmCmAmCmAmUmG*mU* | |
| | | | mC | |
| IN-443 | mC*mA*mUmGmUmGmAmUmU | 883 | mA*fA*mGmAmUmImAmUmGmU | 884 |
| | mAmCmAmUmCmAmUmCmUm | | fAmAmUmCmAmCmAmUmG*mU | |
| | U | | *mC | |
| IN-444 | mC*mA*mUmGfUfGfAmUmUm | 885 | mA*fA*mGmAmUmGmAmUmGm | 886 |
| | AmCmAmUmCmAmUmCmUmU | | UfAmAmUmCmAmCmAmUmG*m | |
| | | | U*mC | |
| IN-445 | mC*mA*mUmGfUfGfAmUmUm | 887 | mA*fA*mGmAfUmGmAmUmGmU | 888 |
| | AmCmAmUmCmAmUmCmUmU | | fAmAmUmCmAmCmAmUmG*mU | |
| | | | *mC | |
| IN-446 | mC*mA*mUmGfUfGfAmUmUm | 889 | mA*fA*mGmAfUmGfAmUmGmUf | 89 |
| | AmCmAmUmCmAmUmCmUmU | | AmAmUmCmAmCmAmUmG*mU* | |
| | | | mC | |
| IN-447 | mC*mA*mUmGfUfGfAmUmUm | 891 | mA*dA*mGmAdUmGdAmUmGmU | 892 |
| | AmCmAmUmCmAmUmCmUmU | | fAdAmUmCmAmCmAmUmG*mU* | |
| | | | mC | |
| IN-448 | mC*mA*mUmGmUmGmAmUmU | 893 | mA*fA*mGmAmUmGmAmUmGm | 894 |
| | mAmCmAmUmCmAmUmCmUm | | UfAmAmUmCmAmCmAmUmG*m | |
| | U | | U*mC | |
| IN-449 | CAUGUUAUUUGCCUUUUGA | 895 | mUfCmAfAmAfAmGfGmCmAmAf | 896 |
| | | | AmUfAmAfCmAfUmGmUmU | |
| IN-450 | CAUGUUAUUUGCCUUUUGA | 897 | mUfCmAfAmAfAmGfGfCmAmAf | 898 |
| | | | AmUfAmAfCmAfUmGmUmU | |
| IN-451 | CAUGUUAUUUGCCUUUUGA | 899 | mUfCmAfAmAfAmGfGmCfAmAf | 900 |
| | | | AmUfAmAfCmAfUmGmUmU | |
| IN-452 | CAUGUUAUUUGCCUUUUGA | 901 | mUfCmAfAmAfAmGfGmCmAfAf | 902 |
| | | | AmUfAmAfCmAfUmGmUmU | |
| IN-453 | CAUGUUAUUUGCCUUUUGA | 903 | mUmCmAfAmAfAmGfGmCmAmA | 904 |
| | | | fAmUfAmAfCmAfUmGmUmU | |
| IN-454 | CAUGUUAUUUGCCUUUUGA | 905 | mUfCmAmAmAfAmGfGmCmAmA | 906 |
| | | | fAmUfAmAfCmAfUmGmUmU | |
| IN-455 | CAUGUUAUUUGCCUUUUGA | 907 | mUfCmAfAmAmAmGfGmCmAmA | 908 |
| | | | fAmUfAmAfCmAfUmGmUmU | |
| IN-456 | CAUGUUAUUUGCCUUUUGA | 909 | mUfCmAfAmAfAmGmGmCmAmA | 910 |
| | | | fAmUfAmAfCmAfUmGmUmU | |
| IN-457 | CAUGUUAUUUGCCUUUUGA | 911 | mUfCmAfAmAfAmGfGmCmAmA | 912 |
| | | | mAmUfAmAfCmAfUmGmUmU | |
| IN-458 | CAUGUUAUUUGCCUUUUGA | 913 | mUfCmAfAmAfAmGfGmCmAmAf | 914 |
| | | | AmUmAmAfCmAfUmGmUmU | |
| IN-459 | CAUGUUAUUUGCCUUUUGA | 915 | mUfCmAfAmAfAmGfGmCmAmAf | 916 |
| | | | AmUfAmAmCmAfUmGmUmU | |
| IN-460 | CAUGUUAUUUGCCUUUUGA | 917 | mUfCmAfAmAfAmGfGmCmAmAf | 918 |
| | | | AmUfAmAfCmAmUmGmUmU | |
| IN-461 | CAUGUUAUUUGCCUUUUGA | 919 | mU*fCmAfAmAfAmGfGmCmAmA | 920 |
| | | | fAmUfAmAfCmAfUmGmU*mU | |
| IN-462 | CAUGUUAUUUGCCUUUUGA | 921 | mU*fC*mAfAmAfAmGfGmCmAm | 922 |
| | | | AfAmUfAmAfCmAfUmG*mU*mU | |
| IN-463 | CAUGUUAUUUGCCUUUUGA | 923 | mUdCmAfAdAfAdGfGmCmAmAd | 924 |
| | | | AmUfAmAfCmAfUmGmUmU | |
| IN-464 | CAUGUUAUUUGCCUUUUGA | 925 | mUfCmAfAmAfAmIfGmCmAmAf | 926 |
| | | | AmUfAmAfCmAfUmmGmmUmmU | |
| IN-465 | CAUGUUAUUUGCCUUUUGA | 927 | mUfCmAfAmAfAmGfImCmAmAf | 928 |
| | | | AmUfAmAfCmAfUmmmGmmmU | |
| | | | mmmU | |
| IN-466 | mCmAmUmGfUfUfAfUfUfUmG | 929 | UCAAAAGGCAAAUAACAUGUU | 930 |
| | mCmCmUmUmUmUmGmA | | | |
| IN-467 | mCmAmUmGmUfUfAfUfUfUmG | 931 | UCAAAAGGCAAAUAACAUGUU | 932 |
| | mCmCmUmUmUmUmGmA | | | |
| IN-468 | mCmAmUmGmUmUfAfUfUfUm | 933 | UCAAAAGGCAAAUAACAUGUU | 934 |
| | GmCmCmUmUmUmUmGmA | | | |
| IN-469 | mCmAmUmGmUmUmAfUfUfUm | 935 | UCAAAAGGCAAAUAACAUGUU | 936 |
| | GmCmCmUmUmUmUmGmA | | | |
| IN-470 | mCmAmUmGfUmUmAmUfUfUm | 937 | UCAAAAGGCAAAUAACAUGUU | 938 |
| | GmCmCmUmUmUmUmGmA | | | |
| IN-471 | mCmAmUmGfUfUmAmUmUfUm | 939 | UCAAAAGGCAAAUAACAUGUU | 940 |
| | GmCmCmUmUmUmUmGmA | | | |
| IN-472 | mCmAmUmGfUfUfAmUmUmUm | 941 | UCAAAAGGCAAAUAACAUGUU | 942 |
| | GmCmCmUmUmUmUmGmA | | | |
| IN-473 | mCmAmUmGfUfUfAfUmUmUm | 943 | UCAAAAGGCAAAUAACAUGUU | 944 |
| | GmCmCmUmUmUmUmGmA | | | |
| IN-474 | mCmAmUmGfUfUfAfUfUmUmG | 945 | UCAAAAGGCAAAUAACAUGUU | 946 |
| | mCmCmUmUmUmUmGmA | | | |
| IN-475 | mC*mAmUmGfUfUfAfUfUfUmG | 947 | UCAAAAGGCAAAUAACAUGUU | 948 |
| | mCmCmUmUmUmUmGmA | | | |
| IN-476 | mC*mA*mUmGfUfUfAfUfUfUm | 949 | UCAAAAGGCAAAUAACAUGUU | 950 |
| | GmCmCmUmUmUmUmGmA | | | |
| IN-477 | mC*mA*mUmGfUfUfAfUfUfUm | 951 | mU*fC*mAfAmAfAmGfGmCmAm | 952 |
| | GmCmCmUmUmUmUmGmA | | AfAmUfAmAfCmAfUmG*mU*mU | |
| IN-479 | mA*mG*mUmCmAmAmAmGmC | 955 | mU*fA*mUmGmAfAmAfAmUmA | 956 |
| | mUmAmUmUmUmUmCmA*mU* | | mGmCmUfUmUmGmAmCmU*mU | |
| | mA | | *mU | |
| IN-480 | mA*mG*mUmCmAmAmAmGmC | 957 | mU*fA*mUmGfAfAmAfAmUmAm | 958 |
| | mUmAmUmUmUmUmCmA*mU* | | GmCmUfUmUmGmAmCmU*mU* | |
| | mA | | mU | |
| IN-481 | mA*mG*mUmCmAmAmAmGmC | 959 | mU*fA*mUmGmAfAfAfAmUmAm | 960 |
| | mUmAmUmUmUmUmCmA*mU* | | GmCmUfUmUmGmAmCmU*mU* | |
| | mA | | mU | |
| IN-482 | mA*mG*mUmCmAmAmAmGmC | 961 | mU*fA*mUmGfAfAfAfAmUmAm | 962 |
| | mUmAmUmUmUmUmCmA*mU* | | GmCmUfUmUmGmAmCmU*mU* | |
| | mA | | mU | |
| IN-483 | mA*mG*mUmCmAmAmAmGmC | 963 | mU*dA*mUfGdAfAdAfAmUmAm | 964 |
| | mUmAmUmUmUmUmCmA*mU* | | GdCmUfUmUfGmAfCmU*mU*mU | |
| | mA | | | |
| IN-484 | mC*mG*mUmCmAmAmAmGmC | 965 | mU*dA*mUfGdAfAdAfAmUmAm | 966 |
| | mUmAmUmUmUmUmCmA*mU* | | GdCmUfUmUfGmAfCmG*mU*mU | |
| | mA | | | |
| IN-485 | mA*mG*mUmCmAmAfAfGfCm | 967 | mU*fA*mUmGmAfAmAfAmUmA | 968 |
| | UmAmUmUmUmUmCmA*mU*m | | mGmCmUfUmUmGmAmCmU*mU | |
| | A | | *mU | |
| IN-486 | mC*mA*mUmGmUmUfAfUfUm | 969 | mU*fC*mAmAmAmAmGmGmCm | 970 |
| | UmGmCmCmUmUmUmU*mG*m | | AmAmAmUfAmAmCmAmUmG*m | |
| | A | | U*mU | |
| IN-487 | mC*mA*mUmGmUmUfAfUfUm | 971 | mU*dC*mAfAdAfAdGfGmCmAm | 972 |
| | UmGmCmCmUmUmUmU*mG*m | | AdAmUfAmAfCmAfUmG*mU*mU | |
| | A | | | |
| IN-488 | mC*mA*mUmGmUmUfAfUfUm | 973 | mU*fC*mAmAmAmAmGmImCmA | 974 |
| | UmGmCmCmUmUmUmU*mG*m | | mAmAmUfAmAmCmAmUmG*mU | |
| | A | | *mU | |
| INI-001 | GUGAGGGUCAAGCACAGCU | 975 | AICUGUGCUUGACCCUCACAG | 976 |
| INI-002 | GAGGGUCAAGCACAGCUAU | 977 | AUAICUGUGCUUGACCCUCAC | 978 |
| INI-003 | GGGUCAAGCACAGCUAUCC | 979 | GIAUAGCUGUGCUUGACCCUC | 980 |
| INI-004 | GGUCAAGCACAGCUAUCCA | 981 | UIGAUAGCUGUGCUUGACCCU | 982 |
| INI-005 | GUCAAGCACAGCUAUCCAU | 983 | AUIGAUAGCUGUGCUUGACCC | 984 |
| INI-006 | UCAAGCACAGCUAUCCAUC | 985 | GAUIGAUAGCUGUGCUUGACC | 986 |
| INI-007 | CAAGCACAGCUAUCCAUCA | 987 | UIAUGGAUAGCUGUGCUUGAC | 988 |
| INI-008 | AAGCACAGCUAUCCAUCAG | 989 | CUIAUGGAUAGCUGUGCUUGA | 990 |
| INI-009 | AGCACAGCUAUCCAUCAGA | 991 | UCUIAUGGAUAGCUGUGCUUG | 992 |
| INI-010 | GCACAGCUAUCCAUCAGAU | 993 | AUCUIAUGGAUAGCUGUGCUU | 994 |
| INI-011 | CACAGCUAUCCAUCAGAUG | 995 | CAUCUIAUGGAUAGCUGUGCU | 996 |
| INI-012 | ACAGCUAUCCAUCAGAUGA | 997 | UCAUCUIAUGGAUAGCUGUGC | 998 |
| INI-013 | CAGCUAUCCAUCAGAUGAU | 999 | AUCAUCUIAUGGAUAGCUGUG | 1000 |
| INI-014 | GCUAUCCAUCAGAUGAUCU | 1001 | AIAUCAUCUGAUGGAUAGCUG | 1002 |
| INI-015 | CUAUCCAUCAGAUGAUCUA | 1003 | UAIAUCAUCUGAUGGAUAGCU | 1004 |
| INI-016 | AUCCAUCAGAUGAUCUACU | 1005 | AIUAGAUCAUCUGAUGGAUAG | 1006 |
| INI-017 | UCCAUCAGAUGAUCUACUU | 1007 | AAIUAGAUCAUCUGAUGGAUA | 1008 |
| INI-018 | CCAUCAGAUGAUCUACUUU | 1009 | AAAIUAGAUCAUCUGAUGGAU | 1010 |
| INI-019 | CAUCAGAUGAUCUACUUUC | 1011 | GAAAIUAGAUCAUCUGAUGGA | 1012 |
| INI-020 | AUCAGAUGAUCUACUUUCA | 1013 | UIAAAGUAGAUCAUCUGAUGG | 1014 |
| INI-021 | CAGAUGAUCUACUUUCAGC | 1015 | GCUIAAAGUAGAUCAUCUGAU | 1016 |
| INI-022 | GAUGAUCUACUUUCAGCCU | 1017 | AIGCUGAAAGUAGAUCAUCUG | 1018 |
| INI-023 | AUGAUCUACUUUCAGCCUU | 1019 | AAIGCUGAAAGUAGAUCAUCU | 1020 |
| INI-024 | UUCCUGAGUCCCAGACAAU | 1021 | AUUIUCUGGGACUCAGGAAGG | 1022 |
| INI-025 | UCCUGAGUCCCAGACAAUA | 1023 | UAUUIUCUGGGACUCAGGAAG | 1024 |
| INI-026 | UGAGUCCCAGACAAUAGAA | 1025 | UUCUAUUIUCUGGGACUCAGG | 1026 |
| INI-027 | CAAUAGAAGACAGGUGGCU | 1027 | AICCACCUGUCUUCUAUUGUC | 1028 |
| INI-028 | AUAGAAGACAGGUGGCUGU | 1029 | ACAICCACCUGUCUUCUAUUG | 1030 |
| INI-029 | AGGUGUGGCAGUGGUGUCU | 1031 | AIACACCACUGCCACACCUAC | 1032 |
| INI-030 | CAUUGGCCCCCAGCAAUCA | 1033 | UIAUUGCUGGGGGCCAAUGAG | 1034 |
| INI-031 | AGCUAGCCAAGCAGCAAAU | 1035 | AUUUICUGCUUGGCUAGCUCC | 1036 |
| INI-032 | UAGCCAAGCAGCAAAUCCU | 1037 | AIGAUUUGCUGCUUGGCUAGC | 1038 |
| INI-033 | ACCAGUCGUCCCAGAAUAA | 1039 | UUAUUCUIGGACGACUGGUCA | 1040 |
| INI-034 | CAGUCGUCCCAGAAUAACU | 1041 | AIUUAUUCUGGGACGACUGGU | 1042 |
| INI-035 | AGUCGUCCCAGAAUAACUC | 1043 | GAIUUAUUCUGGGACGACUGG | 1044 |
| INI-036 | UCGUCCCAGAAUAACUCAU | 1045 | AUIAGUUAUUCUGGGACGACU | 1046 |
| INI-037 | GGAAUGGGGAGGAGGUCAU | 1047 | AUIACCUCCUCCCCAUUCCCU | 1048 |
| INI-038 | GAGGUCAUCAGCUUUGCUA | 1049 | UAICAAAGCUGAUGACCUCCU | 1050 |
| INI-039 | GGUCAUCAGCUUUGCUACU | 1051 | AIUAGCAAAGCUGAUGACCUC | 1052 |
| INI-040 | GUCAUCAGCUUUGCUACUG | 1053 | CAIUAGCAAAGCUGAUGACCU | 1054 |
| INI-041 | UCAUCAGCUUUGCUACUGU | 1055 | ACAIUAGCAAAGCUGAUGACC | 1056 |
| INI-042 | CAUCAGCUUUGCUACUGUC | 1057 | GACAIUAGCAAAGCUGAUGAC | 1058 |
| INI-043 | GCUUUGCUACUGUCACAGA | 1059 | UCUIUGACAGUAGCAAAGCUG | 1060 |
| INI-044 | UUUGCUACUGUCACAGACU | 1061 | AIUCUGUGACAGUAGCAAAGC | 1062 |
| INI-045 | ACUGUCACAGACUCCACUU | 1063 | AAIUGGAGUCUGUGACAGUAG | 1064 |
| INI-046 | ACCCUUCCUGGCACUCUUU | 1065 | AAAIAGUGCCAGGAAGGGUGG | 1066 |
| INI-047 | CUUCCUGGCACUCUUUGCU | 1067 | AICAAAGAGUGCCAGGAAGGG | 1068 |
| INI-048 | ACUCUUUGCUUGAGGAUCU | 1069 | AIAUCCUCAAGCAAAGAGUGC | 1070 |
| INI-049 | CUCUUUGCUUGAGGAUCUU | 1071 | AAIAUCCUCAAGCAAAGAGUG | 1072 |
| INI-050 | GCUGGCAUACCUUAACUCU | 1073 | AIAGUUAAGGUAUGCCAGCCC | 1074 |
| INI-051 | CUUGAGGGGUGAGAAGUCU | 1075 | AIACUUCUCACCCCUCAAGCC | 1076 |
| INI-052 | AGUCUGGUGUCCUGAAACU | 1077 | AIUUUCAGGACACCAGACUUC | 1078 |
| INI-053 | CUGGUGUCCUGAAACUGCA | 1079 | UICAGUUUCAGGACACCAGAC | 1080 |
| INI-054 | GUGUCCUGAAACUGCAACU | 1081 | AIUUGCAGUUUCAGGACACCA | 1082 |
| INI-055 | UGUCCUGAAACUGCAACUA | 1083 | UAIUUGCAGUUUCAGGACACC | 1084 |
| INI-056 | GUCCUGAAACUGCAACUAG | 1085 | CUAIUUGCAGUUUCAGGACAC | 1086 |
| INI-057 | AGAAGGCAACAGCACAGUU | 1087 | AACUIUGCUGUUGCCUUCUAG | 1088 |
| INI-058 | AGGCAACAGCACAGUUACU | 1089 | AIUAACUGUGCUGUUGCCUUC | 1090 |
| INI-059 | CCUUCCUAGAGCUUAAGAU | 1091 | AUCUUAAICUCUAGGAAGGGC | 1092 |
| INI-060 | AGAGCUUAAGAUCCGAGCC | 1093 | GICUCGGAUCUUAAGCUCUAG | 1094 |
| INI-061 | GAGCUUAAGAUCCGAGCCA | 1095 | UIGCUCGGAUCUUAAGCUCUA | 1096 |
| INI-062 | GCUUAAGAUCCGAGCCAAU | 1097 | AUUIGCUCGGAUCUUAAGCUC | 1098 |
| INI-063 | CCUGCGACCCCCUUAUGUU | 1099 | AACAUAAIGGGGUCGCAGGCU | 1100 |
| INI-064 | UGUUGCAGGCGAGACCAUU | 1101 | AAUIGUCUCGCCUGCAACAUA | 1102 |
| INI-065 | CGAGACCAUUACGUAGACU | 1103 | AIUCUACGUAAUGGUCUCGCC | 1104 |
| INI-066 | GAGACCAUUACGUAGACUU | 1105 | AAIUCUACGUAAUGGUCUCGC | 1106 |
| INI-067 | AUUACGUAGACUUCCAGGA | 1107 | UCCUIGAAGUCUACGUAAUGG | 1108 |
| INI-068 | AGGGGUACCAGCUGAAUUA | 1109 | UAAUUCAICUGGUACCCCUCG | 1110 |
| INI-069 | AUUGCUGCCUCUUUCCAUU | 1111 | AAUIGAAAGAGGCAGCAAUGC | 1112 |
| INI-070 | CUUUCCAUUCUGCCGUCUU | 1113 | AAIACGGCAGAAUGGAAAGAG | 1114 |
| INI-071 | CCUCCUCAAAGCCAACAAU | 1115 | AUUIUUGGCUUUGAGGAGGCU | 1116 |
| INI-072 | CCUCAAAGCCAACAAUCCU | 1117 | AIGAUUGUUGGCUUUGAGGAG | 1118 |
| INI-073 | CUCAAAGCCAACAAUCCUU | 1119 | AAIGAUUGUUGGCUUUGAGGA | 1120 |
| INI-074 | CCUGCCAGUACCUCCUGUU | 1121 | AACAIGAGGUACUGGCAGGCC | 1122 |
| INI-075 | UCUCCUCUACCUGGAUCAU | 1123 | AUIAUCCAGGUAGAGGAGAGA | 1124 |
| INI-076 | CUCCUCUACCUGGAUCAUA | 1125 | UAUIAUCCAGGUAGAGGAGAG | 1126 |
| INI-077 | UCCUCUACCUGGAUCAUAA | 1127 | UUAUIAUCCAGGUAGAGGAGA | 1128 |
| INI-078 | CCUCUACCUGGAUCAUAAU | 1129 | AUUAUIAUCCAGGUAGAGGAG | 1130 |
| INI-079 | CCUGGAUCAUAAUGGCAAU | 1131 | AUUICCAUUAUGAUCCAGGUA | 1132 |
| INI-080 | UGGAUCAUAAUGGCAAUGU | 1133 | ACAUUICCAUUAUGAUCCAGG | 1134 |
| INI-081 | AUAAUGGCAAUGUGGUCAA | 1135 | UUIACCACAUUGCCAUUAUGA | 1136 |
| INI-082 | AUGUGGUCAAGACGGAUGU | 1137 | ACAUCCIUCUUGACCACAUUG | 1138 |
| INI-083 | AGACGGAUGUGCCAGAUAU | 1139 | AUAUCUIGCACAUCCGUCUUG | 1140 |
| INI-084 | UUUGGAGUGAAGAGACCAA | 1141 | UUIGUCUCUUCACUCCAAAGC | 1142 |
| INI-085 | AGUGAAGAGACCAAGAUGA | 1143 | UCAUCUUIGUCUCUUCACUCC | 1144 |
| INI-086 | UGACUGGAGGCAUCAGAUU | 1145 | AAUCUIAUGCCUCCAGUCACA | 1146 |
| INI-087 | AACAACCACCUGGCAAUAU | 1147 | AUAUUICCAGGUGGUUGUUGG | 1148 |
| INI-088 | CCACCUGGCAAUAUGACUC | 1149 | GAIUCAUAUUGCCAGGUGGUU | 1150 |
| INI-089 | CCUGGCAAUAUGACUCACU | 1151 | AIUGAGUCAUAUUGCCAGGUG | 1152 |
| INI-090 | CUGGCAAUAUGACUCACUU | 1153 | AAIUGAGUCAUAUUGCCAGGU | 1154 |
| INI-091 | CAAAUGGGCACUUUCUUGU | 1155 | ACAAIAAAGUGCCCAUUUGGG | 1156 |
| INI-092 | AAUGGGCACUUUCUUGUCU | 1157 | AIACAAGAAAGUGCCCAUUUG | 1158 |
| INI-093 | CACUUUCUUGUCUGAGACU | 1159 | AIUCUCAGACAAGAAAGUGCC | 1160 |
| INI-094 | ACUUUCUUGUCUGAGACUC | 1161 | GAIUCUCAGACAAGAAAGUGC | 1162 |
| INI-095 | CUUUCUUGUCUGAGACUCU | 1163 | AIAGUCUCAGACAAGAAAGUG | 1164 |
| INI-096 | UGUCUGAGACUCUGGCUUA | 1165 | UAAICCAGAGUCUCAGACAAG | 1166 |
| INI-097 | UCUGAGACUCUGGCUUAUU | 1167 | AAUAAICCAGAGUCUCAGACA | 1168 |
| INI-098 | UUAUUCCAGGUUGGCUGAU | 1169 | AUCAICCAACCUGGAAUAAGC | 1170 |
| INI-099 | GGGAGAUGGGUAAAGCGUU | 1171 | AACICUUUACCCAUCUCCCAA | 1172 |
| INI-100 | GGAGAUGGGUAAAGCGUUU | 1173 | AAACICUUUACCCAUCUCCCA | 1174 |
| INI-101 | GGGUAAAGCGUUUCUUCUA | 1175 | UAIAAGAAACGCUUUACCCAU | 1176 |
| INI-102 | GGUAAAGCGUUUCUUCUAA | 1177 | UUAIAAGAAACGCUUUACCCA | 1178 |
| INI-103 | GUAAAGCGUUUCUUCUAAA | 1179 | UUUAIAAGAAACGCUUUACCC | 1180 |
| INI-104 | UAAAGCGUUUCUUCUAAAG | 1181 | CUUUAIAAGAAACGCUUUACC | 1182 |
| INI-105 | GUUUCUUCUAAAGGGGUCU | 1183 | AIACCCCUUUAGAAGAAACGC | 1184 |
| INI-106 | UUUCUUCUAAAGGGGUCUA | 1185 | UAIACCCCUUUAGAAGAAACG | 1186 |
| INI-107 | GGUCUACCCAGAAAGCAUG | 1187 | CAUICUUUCUGGGUAGACCCC | 1188 |
| INI-108 | UCUACCCAGAAAGCAUGAU | 1189 | AUCAUICUUUCUGGGUAGACC | 1190 |
| INI-109 | CUACCCAGAAAGCAUGAUU | 1191 | AAUCAUICUUUCUGGGUAGAC | 1192 |
| INI-110 | UACCCAGAAAGCAUGAUUU | 1193 | AAAUCAUICUUUCUGGGUAGA | 1194 |
| INI-111 | CCAGAAAGCAUGAUUUCCU | 1195 | AIGAAAUCAUGCUUUCUGGGU | 1196 |
| INI-112 | AAGCAUGAUUUCCUGCCCU | 1197 | AIGGCAGGAAAUCAUGCUUUC | 1198 |
| INI-113 | AUGAUUUCCUGCCCUAAGU | 1199 | ACUUAIGGCAGGAAAUCAUGC | 1200 |
| INI-114 | AAGGCAGAGAAAAAUUACU | 1201 | AIUAAUUUUUCUCUGCCUUCC | 1202 |
| INI-115 | AGGCAGAGAAAAAUUACUU | 1203 | AAIUAAUUUUUCUCUGCCUUC | 1204 |
| INI-116 | GGAGGAGGAAGCAGAUAGA | 1205 | UCUAUCUICUUCCUCCUCCCC | 1206 |
| INI-117 | AGGGCUGUUGAGGUACCUU | 1207 | AAIGUACCUCAACAGCCCUUA | 1208 |
| INI-118 | GGCUGUUGAGGUACCUUAA | 1209 | UUAAIGUACCUCAACAGCCCU | 1210 |
| INI-119 | GAAACAGGAGUCAGGAAAA | 1211 | UUUUCCUIACUCCUGUUUCUG | 1212 |
| INI-120 | GUCAGGAAAAUGAGGCACU | 1213 | AIUGCCUCAUUUUCCUGACUC | 1214 |
| INI-121 | UAAGAAGUUCCCUGGUUUU | 1215 | AAAACCAIGGAACUUCUUA | 1216 |
| INI-122 | CACUGGGAGACAAGCAUUU | 1217 | AAAUICUUGUCUCCCAGUG | 1218 |
| INI-123 | ACUGGGAGACAAGCAUUUA | 1219 | UAAAUICUUGUCUCCCAGU | 1220 |
| INI-124 | CUGGGAGACAAGCAUUUAU | 1221 | AUAAAUICUUGUCUCCCAG | 1222 |
| INI-125 | UGGGAGACAAGCAUUUAUA | 1223 | UAUAAAUICUUGUCUCCCA | 1224 |
| INI-126 | GGAGACAAGCAUUUAUACU | 1225 | AIUAUAAAUGCUUGUCUCC | 1226 |
| INI-127 | GAGACAAGCAUUUAUACUU | 1227 | AAIUAUAAAUGCUUGUCUC | 1228 |
| INI-128 | AGACAAGCAUUUAUACUUU | 1229 | AAAIUAUAAAUGCUUGUCU | 1230 |
| INI-129 | ACAAGCAUUUAUACUUUCU | 1231 | AIAAAGUAUAAAUGCUUGU | 1232 |
| INI-130 | CAAGCAUUUAUACUUUCUU | 1233 | AAIAAAGUAUAAAUGCUUG | 1234 |
| INI-131 | GCAUUUAUACUUUCUUUCU | 1235 | AIAAAGAAAGUAUAAAUGC | 1236 |
| INI-132 | CAUUUAUACUUUCUUUCUU | 1237 | AAIAAAGAAAGUAUAAAUG | 1238 |
| INI-133 | GGAGAAAGAAAAUCAACAA | 1239 | UUIUUGAUUUUCUUUCUCC | 1240 |
| INI-134 | AGAAAGAAAAUCAACAAAU | 1241 | AUUUIUUGAUUUUCUUUCU | 1242 |
| INI-135 | UCAACAAAUGUGAGUCAUA | 1243 | UAUIACUCACAUUUGUUGA | 1244 |
| INI-136 | CAACAAAUGUGAGUCAUAA | 1245 | UUAUIACUCACAUUUGUUG | 1246 |
| INI-137 | CAAAUGUGAGUCAUAAAGA | 1247 | UCUUUAUIACUCACAUUUG | 1248 |
| INI-138 | AUGGUCCAGAGCAACAGUU | 1249 | AACUIUUGCUCUGGACCAU | 1250 |
| INI-139 | GUCCAGAGCAACAGUUCUU | 1251 | AAIAACUGUUGCUCUGGAC | 1252 |
| INI-140 | CAGAGCAACAGUUCUUCAA | 1253 | UUIAAGAACUGUUGCUCUG | 1254 |
| INI-141 | GAGCAACAGUUCUUCAAGU | 1255 | ACUUIAAGAACUGUUGCUC | 1256 |
| INI-142 | ACAGUUCUUCAAGUGUACU | 1257 | AIUACACUUGAAGAACUGU | 1258 |
| INI-143 | GUGUACUCUGUAGGCUUCU | 1259 | AIAAGCCUACAGAGUACAC | 1260 |
| INI-144 | GCUUCUGGGAGGUCCCUUU | 1261 | AAAIGGACCUCCCAGAAGC | 1262 |
| INI-145 | UCAGGGGUGUCCACAAAGU | 1263 | ACUUUIUGGACACCCCUGA | 1264 |
| INI-146 | GGGUGUCCACAAAGUCAAA | 1265 | UUUIACUUUGUGGACACCC | 1266 |
| INI-147 | GGUGUCCACAAAGUCAAAG | 1267 | CUUUIACUUUGUGGACACC | 1268 |
| INI-148 | UGUCCACAAAGUCAAAGCU | 1269 | AICUUUGACUUUGUGGACA | 1270 |
| INI-149 | UCCACAAAGUCAAAGCUAU | 1271 | AUAICUUUGACUUUGUGGA | 1272 |
| INI-150 | CCACAAAGUCAAAGCUAUU | 1273 | AAUAICUUUGACUUUGUGG | 1274 |
| INI-151 | CACAAAGUCAAAGCUAUUU | 1275 | AAAUAICUUUGACUUUGUG | 1276 |
| INI-152 | ACAAAGUCAAAGCUAUUUU | 1277 | AAAAUAICUUUGACUUUGU | 1278 |
| INI-153 | AGUCAAAGCUAUUUUCAUA | 1279 | UAUIAAAAUAGCUUUGACU | 1280 |
| INI-154 | GUCAAAGCUAUUUUCAUAA | 1281 | UUAUIAAAAUAGCUUUGAC | 1282 |
| INI-155 | UCAAAGCUAUUUUCAUAAU | 1283 | AUUAUIAAAAUAGCUUUGA | 1284 |
| INI-156 | CUAUUUUCAUAAUAAUACU | 1285 | AIUAUUAUUAUGAAAAUAG | 1286 |
| INI-157 | AUUUUCAUAAUAAUACUAA | 1287 | UUAIUAUUAUUAUGAAAAU | 1288 |
| INI-158 | CAUAAUAAUACUAACAUGU | 1289 | ACAUIUUAGUAUUAUUAUG | 1290 |
| INI-159 | AUAAUAAUACUAACAUGUU | 1291 | AACAUIUUAGUAUUAUUAU | 1292 |
| INI-160 | ACUAACAUGUUAUUUGCCU | 1293 | AIGCAAAUAACAUGUUAGU | 1294 |
| INI-161 | UAACAUGUUAUUUGCCUUU | 1295 | AAAIGCAAAUAACAUGUUA | 1296 |
| INI-162 | CAUGUUAUUUGCCUUUUGA | 1297 | UCAAAAIGCAAAUAACAUG | 1298 |
| INI-163 | UGCCUUUUGAAUUCUCAUU | 1299 | AAUIAGAAUUCAAAAGGCA | 1300 |
| INI-164 | GCCUUUUGAAUUCUCAUUA | 1301 | UAAUIAGAAUUCAAAAGGC | 1302 |
| INI-165 | CCUUUUGAAUUCUCAUUAU | 1303 | AUAAUIAGAAUUCAAAAGG | 1304 |
| INI-166 | UGAAUUCUCAUUAUCUUAA | 1305 | UUAAIAUAAUGAGAAUUCA | 1306 |
| INI-167 | GAAUUCUCAUUAUCUUAAA | 1307 | UUUAAIAUAAUGAGAAUUC | 1308 |
| INI-168 | AUUCUCAUUAUCUUAAAAU | 1309 | AUUUUAAIAUAAUGAGAAU | 1310 |
| INI-169 | CGUGUGACAUGUGAUUACA | 1311 | UIUAAUCACAUGUCACACG | 1312 |
| INI-170 | GUGUGACAUGUGAUUACAU | 1313 | AUIUAAUCACAUGUCACAC | 1314 |
| INI-171 | UGACAUGUGAUUACAUCAU | 1315 | AUIAUGUAAUCACAUGUCA | 1316 |
| INI-172 | ACAUGUGAUUACAUCAUCU | 1317 | AIAUGAUGUAAUCACAUGU | 1318 |
| INI-173 | CAUGUGAUUACAUCAUCUU | 1319 | AAIAUGAUGUAAUCACAUG | 1320 |
| INI-174 | GUGAUUACAUCAUCUUUCU | 1321 | AIAAAGAUGAUGUAAUCAC | 1322 |
| INI-175 | GAUUACAUCAUCUUUCUGA | 1323 | UCAIAAAGAUGAUGUAAUC | 1324 |
| INI-176 | CAUCAUCUUUCUGACAUCA | 1325 | UIAUGUCAGAAAGAUGAUG | 1326 |
| INI-177 | UCAUCUUUCUGACAUCAUU | 1327 | AAUIAUGUCAGAAAGAUGA | 1328 |
| INI-178 | UCUUUCUGACAUCAUUGUU | 1329 | AACAAUIAUGUCAGAAAGA | 1330 |
| INI-179 | CUUUCUGACAUCAUUGUUA | 1331 | UAACAAUIAUGUCAGAAAG | 1332 |
| INI-180 | UGUUAAUGGAAUGUGUGCU | 1333 | AICACACAUUCCAUUAACA | 1334 |
| INI-181 | GUUAAUGGAAUGUGUGCUU | 1335 | AAICACACAUUCCAUUAAC | 1336 |
| INI-182 | GUGAGGGUCAAGCACAGCU | 1337 | AGCUIUGCUUGACCCUCACAG | 1338 |
| INI-183 | GAGGGUCAAGCACAGCUAU | 1339 | AUAGCUIUGCUUGACCCUCAC | 1340 |
| INI-184 | GGGUCAAGCACAGCUAUCC | 1341 | GGAUAICUGUGCUUGACCCUC | 1342 |
| INI-185 | GGUCAAGCACAGCUAUCCA | 1343 | UGIAUAGCUGUGCUUGACCCU | 1344 |
| INI-186 | GUCAAGCACAGCUAUCCAU | 1345 | AUGIAUAGCUGUGCUUGACCC | 1346 |
| INI-187 | UCAAGCACAGCUAUCCAUC | 1347 | GAUGIAUAGCUGUGCUUGACC | 1348 |
| INI-188 | CAAGCACAGCUAUCCAUCA | 1349 | UGAUIGAUAGCUGUGCUUGAC | 1350 |
| INI-189 | AAGCACAGCUAUCCAUCAG | 1351 | CUGAUIGAUAGCUGUGCUUGA | 1352 |
| INI-190 | AGCACAGCUAUCCAUCAGA | 1353 | UCUGAUIGAUAGCUGUGCUUG | 1354 |
| INI-191 | GCACAGCUAUCCAUCAGAU | 1355 | AUCUGAUIGAUAGCUGUGCUU | 1356 |
| INI-192 | AUCCAUCAGAUGAUCUACU | 1357 | AGUAIAUCAUCUGAUGGAUAG | 1358 |
| INI-193 | UCCAUCAGAUGAUCUACUU | 1359 | AAGUAIAUCAUCUGAUGGAUA | 1360 |
| INI-194 | CCAUCAGAUGAUCUACUUU | 1361 | AAAGUAIAUCAUCUGAUGGAU | 1362 |
| INI-195 | CAUCAGAUGAUCUACUUUC | 1363 | GAAAGUAIAUCAUCUGAUGGA | 1364 |
| INI-196 | AUCAGAUGAUCUACUUUCA | 1365 | UGAAAIUAGAUCAUCUGAUGG | 1366 |
| INI-197 | CAGAUGAUCUACUUUCAGC | 1367 | GCUGAAAIUAGAUCAUCUGAU | 1368 |
| INI-198 | GAUGAUCUACUUUCAGCCU | 1369 | AGICUGAAAGUAGAUCAUCUG | 1370 |
| INI-199 | AUGAUCUACUUUCAGCCUU | 1371 | AAGICUGAAAGUAGAUCAUCU | 1372 |
| INI-200 | UUCCUGAGUCCCAGACAAU | 1373 | AUUGUCUIGGACUCAGGAAGG | 1374 |
| INI-201 | CAUUGGCCCCCAGCAAUCA | 1375 | UGAUUICUGGGGGCCAAUGAG | 1376 |
| INI-202 | AGCUAGCCAAGCAGCAAAU | 1377 | AUUUGCUICUUGGCUAGCUCC | 1378 |
| INI-203 | UAGCCAAGCAGCAAAUCCU | 1379 | AGIAUUUGCUGCUUGGCUAGC | 1380 |
| INI-204 | UCGUCCCAGAAUAACUCAU | 1381 | AUGAIUUAUUCUGGGACGACU | 1382 |
| INI-205 | GAGGUCAUCAGCUUUGCUA | 1383 | UAGCAAAICUGAUGACCUCCU | 1384 |
| INI-206 | GGUCAUCAGCUUUGCUACU | 1385 | AGUAICAAAGCUGAUGACCUC | 1386 |
| INI-207 | GUCAUCAGCUUUGCUACUG | 1387 | CAGUAICAAAGCUGAUGACCU | 1388 |
| INI-208 | UCAUCAGCUUUGCUACUGU | 1389 | ACAGUAICAAAGCUGAUGACC | 1390 |
| INI-209 | CAUCAGCUUUGCUACUGUC | 1391 | GACAGUAICAAAGCUGAUGAC | 1392 |
| INI-210 | GCUUUGCUACUGUCACAGA | 1393 | UCUGUIACAGUAGCAAAGCUG | 1394 |
| INI-211 | UUUGCUACUGUCACAGACU | 1395 | AGUCUIUGACAGUAGCAAAGC | 1396 |
| INI-212 | ACUGUCACAGACUCCACUU | 1397 | AAGUIGAGUCUGUGACAGUAG | 1398 |
| INI-213 | ACCCUUCCUGGCACUCUUU | 1399 | AAAGAIUGCCAGGAAGGGUGG | 1400 |
| INI-214 | CUUCCUGGCACUCUUUGCU | 1401 | AGCAAAIAGUGCCAGGAAGGG | 1402 |
| INI-215 | GCUGGCAUACCUUAACUCU | 1403 | AGAIUUAAGGUAUGCCAGCCC | 1404 |
| INI-216 | AGUCUGGUGUCCUGAAACU | 1405 | AGUUUCAIGACACCAGACUUC | 1406 |
| INI-217 | CUGGUGUCCUGAAACUGCA | 1407 | UGCAIUUUCAGGACACCAGAC | 1408 |
| INI-218 | GUGUCCUGAAACUGCAACU | 1409 | AGUUICAGUUUCAGGACACCA | 1410 |
| INI-219 | UGUCCUGAAACUGCAACUA | 1411 | UAGUUICAGUUUCAGGACACC | 1412 |
| INI-220 | GUCCUGAAACUGCAACUAG | 1413 | CUAGUUICAGUUUCAGGACAC | 1414 |
| INI-221 | AGAAGGCAACAGCACAGUU | 1415 | AACUGUICUGUUGCCUUCUAG | 1416 |
| INI-222 | AGGCAACAGCACAGUUACU | 1417 | AGUAACUIUGCUGUUGCCUUC | 1418 |
| INI-223 | AGAGCUUAAGAUCCGAGCC | 1419 | GGCUCIGAUCUUAAGCUCUAG | 1420 |
| INI-224 | GAGCUUAAGAUCCGAGCCA | 1421 | UGICUCGGAUCUUAAGCUCUA | 1422 |
| INI-225 | GCUUAAGAUCCGAGCCAAU | 1423 | AUUGICUCGGAUCUUAAGCUC | 1424 |
| INI-226 | UGUUGCAGGCGAGACCAUU | 1425 | AAUGIUCUCGCCUGCAACAUA | 1426 |
| INI-227 | CGAGACCAUUACGUAGACU | 1427 | AGUCUACIUAAUGGUCUCGCC | 1428 |
| INI-228 | AUUACGUAGACUUCCAGGA | 1429 | UCCUGIAAGUCUACGUAAUGG | 1430 |
| INI-229 | AUUGCUGCCUCUUUCCAUU | 1431 | AAUGIAAAGAGGCAGCAAUGC | 1432 |
| INI-230 | CUUUCCAUUCUGCCGUCUU | 1433 | AAGACIGCAGAAUGGAAAGAG | 1434 |
| INI-231 | CCUCCUCAAAGCCAACAAU | 1435 | AUUGUUIGCUUUGAGGAGGCU | 1436 |
| INI-232 | CCUCAAAGCCAACAAUCCU | 1437 | AGIAUUGUUGGCUUUGAGGAG | 1438 |
| INI-233 | CUCAAAGCCAACAAUCCUU | 1439 | AAGIAUUGUUGGCUUUGAGGA | 1440 |
| INI-234 | CCUGCCAGUACCUCCUGUU | 1441 | AACAGIAGGUACUGGCAGGCC | 1442 |
| INI-235 | AGACGGAUGUGCCAGAUAU | 1443 | AUAUCUGICACAUCCGUCUUG | 1444 |
| INI-236 | UUUGGAGUGAAGAGACCAA | 1445 | UUGIUCUCUUCACUCCAAAGC | 1446 |
| INI-237 | CCUGGCAAUAUGACUCACU | 1447 | AGUIAGUCAUAUUGCCAGGUG | 1448 |
| INI-238 | CUGGCAAUAUGACUCACUU | 1449 | AAGUIAGUCAUAUUGCCAGGU | 1450 |
| INI-239 | AAUGGGCACUUUCUUGUCU | 1451 | AGACAAIAAAGUGCCCAUUUG | 1452 |
| INI-240 | CACUUUCUUGUCUGAGACU | 1453 | AGUCUCAIACAAGAAAGUGCC | 1454 |
| INI-241 | CUUUCUUGUCUGAGACUCU | 1455 | AGAIUCUCAGACAAGAAAGUG | 1456 |
| INI-242 | UGUCUGAGACUCUGGCUUA | 1457 | UAAGCCAIAGUCUCAGACAAG | 1458 |
| INI-243 | GGGUAAAGCGUUUCUUCUA | 1459 | UAGAAIAAACGCUUUACCCAU | 1460 |
| INI-244 | GGUAAAGCGUUUCUUCUAA | 1461 | UUAGAAIAAACGCUUUACCCA | 1462 |
| INI-245 | GUAAAGCGUUUCUUCUAAA | 1463 | UUUAGAAIAAACGCUUUACCC | 1464 |
| INI-246 | CCAGAAAGCAUGAUUUCCU | 1465 | AGIAAAUCAUGCUUUCUGGGU | 1466 |
| INI-247 | AAGCAUGAUUUCCUGCCCU | 1467 | AGIGCAGGAAAUCAUGCUUUC | 1468 |
| INI-248 | AUGAUUUCCUGCCCUAAGU | 1469 | ACUUAGIGCAGGAAAUCAUGC | 1470 |
| INI-249 | AGGGCUGUUGAGGUACCUU | 1471 | AAGIUACCUCAACAGCCCUUA | 1472 |
| INI-250 | GGCUGUUGAGGUACCUUAA | 1473 | UUAAGIUACCUCAACAGCCCU | 1474 |
| INI-251 | GUCAGGAAAAUGAGGCACU | 1475 | AGUICCUCAUUUUCCUGACUC | 1476 |
| INI-252 | ACAAGCAUUUAUACUUUCU | 1477 | AGAAAIUAUAAAUGCUUGU | 1478 |
| INI-253 | CAAGCAUUUAUACUUUCUU | 1479 | AAGAAAIUAUAAAUGCUUG | 1480 |
| INI-254 | GCAUUUAUACUUUCUUUCU | 1481 | AGAAAIAAAGUAUAAAUGC | 1482 |
| INI-255 | CAUUUAUACUUUCUUUCUU | 1483 | AAGAAAIAAAGUAUAAAUG | 1484 |
| INI-256 | GGAGAAAGAAAAUCAACAA | 1485 | UUGUUIAUUUUCUUUCUCC | 1486 |
| INI-257 | AGAAAGAAAAUCAACAAAU | 1487 | AUUUGUUIAUUUUCUUUCU | 1488 |
| INI-258 | AUGGUCCAGAGCAACAGUU | 1489 | AACUGUUICUCUGGACCAU | 1490 |
| INI-259 | GUCCAGAGCAACAGUUCUU | 1491 | AAGAACUIUUGCUCUGGAC | 1492 |
| INI-260 | CAGAGCAACAGUUCUUCAA | 1493 | UUGAAIAACUGUUGCUCUG | 1494 |
| INI-261 | GAGCAACAGUUCUUCAAGU | 1495 | ACUUGAAIAACUGUUGCUC | 1496 |
| INI-262 | GUGUACUCUGUAGGCUUCU | 1497 | AGAAICCUACAGAGUACAC | 1498 |
| INI-263 | GCUUCUGGGAGGUCCCUUU | 1499 | AAAGIGACCUCCCAGAAGC | 1500 |
| INI-264 | UCAGGGGUGUCCACAAAGU | 1501 | ACUUUGUIGACACCCCUGA | 1502 |
| INI-265 | UGUCCACAAAGUCAAAGCU | 1503 | AGCUUUIACUUUGUGGACA | 1504 |
| INI-266 | ACUAACAUGUUAUUUGCCU | 1505 | AGICAAAUAACAUGUUAGU | 1506 |
| INI-267 | UAACAUGUUAUUUGCCUUU | 1507 | AAAGICAAAUAACAUGUUA | 1508 |
| INI-268 | CAUGUUAUUUGCCUUUUGA | 1509 | UCAAAAGICAAAUAACAUG | 1510 |
| INI-269 | UGCCUUUUGAAUUCUCAUU | 1511 | AAUGAIAAUUCAAAAGGCA | 1512 |
| INI-270 | GCCUUUUGAAUUCUCAUUA | 1513 | UAAUGAIAAUUCAAAAGGC | 1514 |
| INI-271 | CCUUUUGAAUUCUCAUUAU | 1515 | AUAAUGAIAAUUCAAAAGG | 1516 |
| INI-272 | UGACAUGUGAUUACAUCAU | 1517 | AUGAUIUAAUCACAUGUCA | 1518 |
| INI-273 | ACAUGUGAUUACAUCAUCU | 1519 | AGAUIAUGUAAUCACAUGU | 1520 |
| INI-274 | CAUGUGAUUACAUCAUCUU | 1521 | AAGAUIAUGUAAUCACAUG | 1522 |
| INI-275 | GUGAUUACAUCAUCUUUCU | 1523 | AGAAAIAUGAUGUAAUCAC | 1524 |
| INI-276 | GAUUACAUCAUCUUUCUGA | 1525 | UCAGAAAIAUGAUGUAAUC | 1526 |
| INI-277 | CAUCAUCUUUCUGACAUCA | 1527 | UGAUIUCAGAAAGAUGAUG | 1528 |
| INI-278 | UCAUCUUUCUGACAUCAUU | 1529 | AAUGAUIUCAGAAAGAUGA | 1530 |
| INI-279 | GUGAGGGUCAAGCACAGCU | 1531 | AGCUGUICUUGACCCUCACAG | 1532 |
| INI-280 | GGUCAAGCACAGCUAUCCA | 1533 | UGGAUAICUGUGCUUGACCCU | 1534 |
| INI-281 | GUCAAGCACAGCUAUCCAU | 1535 | AUGGAUAICUGUGCUUGACCC | 1536 |
| INI-282 | CAAGCACAGCUAUCCAUCA | 1537 | UGAUGIAUAGCUGUGCUUGAC | 1538 |
| INI-283 | AAGCACAGCUAUCCAUCAG | 1539 | CUGAUGIAUAGCUGUGCUUGA | 1540 |
| INI-284 | AGCACAGCUAUCCAUCAGA | 1541 | UCUGAUGIAUAGCUGUGCUUG | 1542 |
| INI-285 | GAUGAUCUACUUUCAGCCU | 1543 | AGGCUIAAAGUAGAUCAUCUG | 1544 |
| INI-286 | AUGAUCUACUUUCAGCCUU | 1545 | AAGGCUIAAAGUAGAUCAUCU | 1546 |
| INI-287 | UAGCCAAGCAGCAAAUCCU | 1547 | AGGAUUUICUGCUUGGCUAGC | 1548 |
| INI-288 | UUUGCUACUGUCACAGACU | 1549 | AGUCUGUIACAGUAGCAAAGC | 1550 |
| INI-289 | ACUGUCACAGACUCCACUU | 1551 | AAGUGIAGUCUGUGACAGUAG | 1552 |
| INI-290 | ACCCUUCCUGGCACUCUUU | 1553 | AAAGAGUICCAGGAAGGGUGG | 1554 |
| INI-291 | GUGUCCUGAAACUGCAACU | 1555 | AGUUGCAIUUUCAGGACACCA | 1556 |
| INI-292 | AGAGCUUAAGAUCCGAGCC | 1557 | GGCUCGIAUCUUAAGCUCUAG | 1558 |
| INI-293 | GAGCUUAAGAUCCGAGCCA | 1559 | UGGCUCIGAUCUUAAGCUCUA | 1560 |
| INI-294 | CUUUCCAUUCUGCCGUCUU | 1561 | AAGACGICAGAAUGGAAAGAG | 1562 |
| INI-295 | CCUCCUCAAAGCCAACAAU | 1563 | AUUGUUGICUUUGAGGAGGCU | 1564 |
| INI-296 | CCUCAAAGCCAACAAUCCU | 1565 | AGGAUUIUUGGCUUUGAGGAG | 1566 |
| INI-297 | CUCAAAGCCAACAAUCCUU | 1567 | AAGGAUUIUUGGCUUUGAGGA | 1568 |
| INI-298 | CCUGCCAGUACCUCCUGUU | 1569 | AACAGGAIGUACUGGCAGGCC | 1570 |
| INI-299 | CCUGGCAAUAUGACUCACU | 1571 | AGUGAIUCAUAUUGCCAGGUG | 1572 |
| INI-300 | CUGGCAAUAUGACUCACUU | 1573 | AAGUGAIUCAUAUUGCCAGGU | 1574 |
| INI-301 | AAGCAUGAUUUCCUGCCCU | 1575 | AGGICAGGAAAUCAUGCUUUC | 1576 |
| INI-302 | AUGAUUUCCUGCCCUAAGU | 1577 | ACUUAGGICAGGAAAUCAUGC | 1578 |
| INI-303 | GCUUCUGGGAGGUCCCUUU | 1579 | AAAGGIACCUCCCAGAAGC | 1580 |
| INI-304 | ACAUGUGAUUACAUCAUCU | 1581 | AGAUGAUIUAAUCACAUGU | 1582 |
| INI-305 | ACUGUCACAGACUCCACUU | 1583 | AAGUGGAIUCUGUGACAGUAG | 1584 |
| INI-306 | GAGCUUAAGAUCCGAGCCA | 1585 | UGGCUCGIAUCUUAAGCUCUA | 1586 |
| INI-307 | AAGCAUGAUUUCCUGCCCU | 1587 | AGGGCAIGAAAUCAUGCUUUC | 1588 |
| INI-308 | AAGCAUGAUUUCCUGCCCU | 1589 | AGGGCAGIAAAUCAUGCUUUC | 1590 |
| IN-489 | mC*mA*mUmGmUmUfAfUfUm | 1759 | mU*dC*fAmAmAmAmGmGmCmA | 1760 |
| | UmGmCmCmUmUmUmU*mG*m | | mAmAmUfAmAmCmAmUmG*mU | |
| | A | | *mU | |
| IN-490 | mC*mA*mUmGmUmUfAfUfUm | 1761 | mU*dC*fAfAmAmAmGmGmCmA | 1762 |
| | UmGmCmCmUmUmUmU*mG*m | | mAmAmUfAmAmCmAmUmG*mU | |
| | A | | *mU | |
| IN-491 | mC*mA*mUmGmUmUfAfUfUm | 1763 | mU*dC*fAfAfAmAmGmGmCmAm | 1764 |
| | UmGmCmCmUmUmUmU*mG*m | | AmAmUfAmAmCmAmUmG*mU* | |
| | A | | mU | |
| IN-492 | mC*mA*mUmGmUmUfAfUfUm | 1765 | mU*dC*mAmAdAmAdGmGmCmA | 1766 |
| | UmGmCmCmUmUmUmU*mG*m | | mAdAmUfAmAmCmAmUmG*mU | |
| | A | | *mU | |
| IN-493 | mC*mA*fUmGmUmUfAfUfUmU | 1767 | mU*dC*mAmAdAmAdGmGmCmA | 1768 |
| | mGmCmCmUmUmUmU*mG*mA | | mAdAmUfAmAmCmAmUmG*mU | |
| | | | *mU | |
| IN-494 | mA*mA*mCmAmUmGmUmUfAf | 1769 | mU*dC*mAmAdAmAdGmGmCmA | 1770 |
| | UfUmUmGmCmCmUmUmUmU* | | mAdAmUfAmAmCmAmUmG*mU | |
| | mG*mA | | *mU | |
| IN-495 | irmA*mA*mCmAmUmGmUmUf | 1771 | mU*dC*mAmAdAmAdGmGmCmA | 1772 |
| | AfUfUmUmGmCmCmUmUmUm | | mAdAmUfAmAmCmAmUmG*mU | |
| | U*mG*mA | | *mU | |
| IN-496 | irmC*mA*mUmGmUmUfAfUfU | 1773 | mU*dC*mAmAdAmAdGmGmCmA | 1774 |
| | mUmGmCmCmUmUmUmU*mG* | | mAdAmUfAmAmCmAmUmG*mU | |
| | mA | | *mU | |
| IN-497 | irmA*mA*mCmAmUmGmUmUf | 1775 | mU*dC*mAmAdAmAdGmGmCmA | 1776 |
| | AfUfUmUmGmCmCmUmUmUm | | mAdAmUfAmAmCmAmUmG*mU | |
| | U*mG*mA | | *mU | |
| IN-498 | mC*mA*mUmGmUmUfAfUfUm | 1777 | mU*fC*mAmAmAmAmGmGmCm | 1778 |
| | UmGmCmCmUmUmUmU*mG*ir | | AmAmAmUfAmAmCmAmUmG*m | |
| | mA | | U*mU | |
| IN-499 | mG*mC*mUmGmAmGfAfCfUm | 1779 | mA*fA*mUmAmAmGmCmCmAm | 1780 |
| | CmUmGmGmCmUmUmAmUmU | | GmAmGmUfCmUmCmAmGmC*m | |
| | | | C*mA | |
| IN-500 | mG*mC*mUmGmAmGfAfCfUm | 1781 | mA*fA*mUmAmAmGmCmCmAfG | 1782 |
| | CmUmGmGmCmUmUmAmUmU | | mAmGmUfCmUmCmAmGmC*mC | |
| | | | *mA | |
| IN-501 | mG*mC*mUmGmAmGfAfCfUm | 1783 | mA*fA*mUmAmAmGmCmCmAm | 1784 |
| | CmUmGmGmCmUmUmAmUmU | | GmAmGmUfCmUmCmAmGmG*m | |
| | | | C*mA | |
| IN-502 | irmG*mC*mUmGmAmGfAfCfUm | 1785 | mA*fA*mUmAmAmGmCmCmAm | 1786 |
| | CmUmGmGmCmUmUmAmUmU | | GmAmGmUfCmUmCmAmGmC*m | |
| | | | C*mA | |
| IN-503 | mG*mC*mUmGmAmGfAfCfUm | 1787 | mA*fA*mUmAmAmImCmCmAmG | 1788 |
| | CmUmGmGmCmUmUmAmUmU | | mAmGmUfCmUmCmAmGmC*mC | |
| | | | *mA | |
| IN-504 | irmG*mC*mUmGmAmGfAfCfUm | 1789 | mA*fA*mUmAmAmImCmCmAmG | 1790 |
| | CmUmGmGmCmUmUmAmUmU | | mAmGmUfCmUmCmAmGmC*mC | |
| | | | *mA | |
| IN-505 | irmG*mC*mUmGmAmGfAfCfUm | 1791 | mA*fA*mUmAmAmGmCmCmAm | 1792 |
| | CmUmGmGmCmUmUmA*mU*m | | GmAmGmUfCmUmCmAmGmC*m | |
| | U | | C*mA | |
| IN-506 | mU*mG*mGmCmUmGmAmGfAf | 1793 | mA*fA*mUmAmAmGmCmCmAm | 1794 |
| | CfUmCmUmGmGmCmUmUmA* | | GmAmGmUfCmUmCmAmGmC*m | |
| | mU*mU | | C*mA | |
| IN-507 | irmU*mG*mGmCmUmGmAmGf | 1795 | mA*fA*mUmAmAmGmCmCmAm | 1796 |
| | AfCfUmCmUmGmGmCmUmUm | | GmAmGmUfCmUmCmAmGmC*m | |
| | A*mU*mU | | C*mA | |
| IN-508 | mU*mG*mUmCmUmGmAmGfAf | 1797 | mA*fA*mUmAmAmGmCmCmAm | 1798 |
| | CfUmCmUmGmGmCmUmUmA* | | GmAmGmUfCmUmCmAmGmA*m | |
| | mU*mU | | C*mA | |
| IN-509 | mG*mC*mUmGmAmGfAfCfUm | 1799 | mA*fA*mUmAmAmGmCmCmAm | 1800 |
| | CmUmGmGmCmUmUmA*mU*ir | | GmAmGmUfCmUmCmAmGmC*m | |
| | mU | | C*mA | |
| IN-510 | mC*mC*mAmUmCmAfGfCfUmU | 1801 | mA*fC*mAmGmUmAmGmCfAmA | 1802 |
| | mUmGmCmUmAmCmUmGmU | | mAfGmCfUmGmAmUmGmG*mU* | |
| | | | mU | |
| IN-511 | mC*mC*mAmUmCmAfGfCfUmU | 1803 | mA*fC*mAmGmUmAmGmCfAmA | 1804 |
| | mUmGmCmUmAmCmUmGmU | | mAfGmCmUmGmAmUmGmG*mU | |
| | | | *mU | |
| IN-512 | mC*mC*mAmUmCmAfGfCfUmU | 1805 | mA*fC*mAmGmUmAmGfCfAmA | 1806 |
| | mUmGmCmUmAmCmUmGmU | | mAfGmCfUmGmAmUmGmG*mU* | |
| | | | mU | |
| IN-513 | mC*mC*mAmUmCmAfGfCfUmU | 1807 | mA*fC*mAmGmUmAmGfCfAmA | 1808 |
| | mUmGmCmUmAmCmUmGmU | | mAfGmCmUmGmAmUmGmG*mU | |
| | | | *mU | |
| IN-514 | mC*mC*mAmUmCmAfGfCfUmU | 1809 | mA*fC*mAmGmUmAmGmCfAmA | 1810 |
| | mUmGmCmUmAmCmU*mG*mU | | mAfGmCfUmGmAmUmGmG*mU* | |
| | | | mU | |
| IN-515 | irmC*mC*mAmUmCmAfGfCfUm | 1811 | mA*fC*mAmGmUmAmGmCfAmA | 1812 |
| | UmUmGmCmUmAmCmU*mG*m | | mAfGmCfUmGmAmUmGmG*mU* | |
| | U | | mU | |
| IN-516 | mA*mA*mCmCmAmUmCmAfGf | 1813 | mA*fC*mAmGmUmAmGmCfAmA | 1814 |
| | CfUmUmUmGmCmUmAmCmU* | | mAfGmCfUmGmAmUmGmG*mU* | |
| | mG*mU | | mU | |
| IN-517 | irmA*mA*mCmCmAmUmCmAf | 1815 | mA*fC*mAmGmUmAmGmCfAmA | 1816 |
| | GfCfUmUmUmGmCmUmAmCm | | mAfGmCfUmGmAmUmGmG*mU* | |
| | U*mG*mU | | mU | |
| IN-518 | CAUGUGAUUACAUCAUCUU | 1817 | AAGAUIAUGUAAUCACAUGUC | 1818 |
| IN-519 | mC*mA*mUmGfUfGfAmUmUm | 1819 | mA*fA*mGmAmUmImAmUmGmU | 1820 |
| | AmCmAmUmCmAmUmCmUmU | | fAmAmUmCmAmCmAmUmG*mU | |
| | | | *mC | |
| IN-520 | mC*mA*mUmGfUfGfAmUmUm | 1821 | mA*fA*mGmAfUmImAmUmGmUf | 1822 |
| | AmCmAmUmCmAmUmCmUmU | | AmAmUmCmAmCmAmUmG*mU* | |
| | | | mC | |
| IN-521 | mC*mA*mUmGfUfGfAmUmUm | 1823 | mA*fA*mGmAfUmIfAmUmGmUf | 1824 |
| | AmCmAmUmCmAmUmCmUmU | | AmAmUmCmAmCmAmUmG*mU* | |
| | | | mC | |
| IN-522 | mC*mA*mUmGfUfGfAmUmUm | 1825 | mA*dA*mGmAdUmIdAmUmGmUf | 1826 |
| | AmCmAmUmCmAmUmCmUmU | | AdAmUmCmAmCmAmUmG*mU* | |
| | | | mC | |
| IN-523 | mC*mA*mUmGmUmGmAmUmU | 1827 | mA*fA*mGmAmUmImAmUmGmU | 1828 |
| | mAmCmAmUmCmAmUmCmUm | | fAmAmUmCmAmCmAmUmG*mU | |
| | U | | *mC | |
| IN-524 | mC*mA*mUmGfUfGfAmUmUm | 1829 | mA*fA*mGmAmUmGmAmUmGm | 1830 |
| | AmCmAmUmCmAmUmCmUmU | | UfAmAmUmCmAmCmAmUmG*m | |
| | | | U*mC | |
| IN-525 | mC*mA*mUmGfUfGfAmUmUm | 1831 | mA*fA*mGmAmUmImAmUmGmU | 1832 |
| | AmCmAmUmCmAmUmC*mU*m | | fAmAmUmCmAmCmAmUmG*mU | |
| | U | | *mC | |
| IN-526 | irmC*mA*mUmGfUfGfAmUmU | 1833 | mA*fA*mGmAmUmImAmUmGmU | 1834 |
| | mAmCmAmUmCmAmUmC*mU* | | fAmAmUmCmAmCmAmUmG*mU | |
| | mU | | *mC | |
| IN-527 | mG*mA*mCmAmUmGfUfGfAm | 1835 | mA*fA*mGmAmUmImAmUmGmU | 1836 |
| | UmUmAmCmAmUmCmAmUmC | | fAmAmUmCmAmCmAmUmG*mU | |
| | *mU*mU | | *mC | |
| IN-528 | irmG*mA*mCmAmUmGfUfGfA | 1837 | mA*fA*mGmAmUmImAmUmGmU | 1838 |
| | mUmUmAmCmAmUmCmAmUm | | fAmAmUmCmAmCmAmUmG*mU | |
| | C*mU*mU | | *mC | |
| IN-529 | mA*mG*mUmCmAmAmAmGmC | 1839 | mU*fA*mUmGmAfAmAfAmUmA | 1840 |
| | mUmAmUmUmUmUmCmA*mU* | | mGmCmUfUmUmGmAmCmU*mU | |
| | mA | | *mU | |
| IN-530 | mA*mG*mUmCmAmAmAmGmC | 1841 | mU*fA*mUmGfAfAmAfAmUmAm | 1842 |
| | mUmAmUmUmUmUmCmA*mU* | | GmCmUfUmUmGmAmCmU*mU* | |
| | mA | | mU | |
| IN-531 | mA*mG*mUmCmAmAmAmGmC | 1843 | mU*fA*mUmGmAfAfAfAmUmAm | 1844 |
| | mUmAmUmUmUmUmCmA*mU* | | GmCmUfUmUmGmAmCmU*mU* | |
| | mA | | mU | |
| IN-532 | mA*mG*mUmCmAmAmAmGmC | 1845 | mU*fA*mUmGfAfAfAfAmUmAm | 1846 |
| | mUmAmUmUmUmUmCmA*mU* | | GmCmUfUmUmGmAmCmU*mU* | |
| | mA | | mU | |
| IN-533 | mA*mG*mUmCmAmAmAmGmC | 1847 | mU*dA*mUfGdAfAdAfAmUmAm | 1848 |
| | mUmAmUmUmUmUmCmA*mU* | | GdCmUfUmUfGmAfCmU*mU*mU | |
| | mA | | | |
| IN-534 | mC*mG*mUmCmAmAmAmGmC | 1849 | mU*dA*mUfGdAfAdAfAmUmAm | 1850 |
| | mUmAmUmUmUmUmCmA*mU* | | GdCmUfUmUfGmAfCmG*mU*mU | |
| | mA | | | |
| IN-535 | mA*mG*mUmCmAmAfAfGfCm | 1851 | mU*fA*mUmGmAfAmAfAmUmA | 1852 |
| | UmAmUmUmUmUmCmA*mU*m | | mGmCmUfUmUmGmAmCmU*mU | |
| | A | | *mU | |
| IN-536 | mA*mG*mUmCmAmAfAfGfCm | 1853 | mU*dA*mUfGdAfAdAfAmUmAm | 1854 |
| | UmAmUmUmUmUmCmAmUmA | | GdCmUfUmUfGmAfCmU*mU*mU | |
| IN-537 | mA*mG*mUmCmAmAfAfGfCm | 1855 | mU*dA*mUfGdAfAdAfAmUmAm | 1856 |
| | UmAmUmUmUmUmCmAmUmA | | GdCmUfUmUmGmAmCmU*mU*m | |
| | | | U | |
| IN-538 | mA*mG*mUmCmAmAfAfGfCm | 1857 | mU*dA*mUfIdAfAdAfAmUmAmG | 1858 |
| | UmAmUmUmUmUmCmAmUmA | | dCmUfUmUfGmAfCmU*mU*mU | |
| IN-539 | mA*mG*mUmCmAmAfAfGfCm | 1859 | mU*dA*mUfIdAfAdAfAmUmAmG | 1860 |
| | UmAmUmUmUmUmCmAmUmA | | dCmUfUmUmGmAmCmU*mU*mU | |
| IN-540 | mA*mG*mUmCmAmAfAfGfCm | 1861 | mU*dA*mUfGdAfAdAfAmUmAm | 1862 |
| | UmAmUmUmUmUmCmA*mU*m | | GdCmUfUmUfGmAfCmU*mU*mU | |
| | A | | | |
| IN-541 | irmA*mG*mUmCmAmAfAfGfCm | 1863 | mU*dA*mUfGdAfAdAfAmUmAm | 1864 |
| | UmAmUmUmUmUmCmA*mU*m | | GdCmUfUmUfGmAfCmU*mU*mU | |
| | A | | | |
| IN-542 | mA*mA*mAmGmUmCmAmAfAf | 1865 | mU*dA*mUfGdAfAdAfAmUmAm | 1866 |
| | GfCmUmAmUmUmUmUmCmA* | | GdCmUfUmUfGmAfCmU*mU*mU | |
| | mU*mA | | | |
| IN-543 | irmA*mA*mAmGmUmCmAmAf | 1867 | mU*dA*mUfGdAfAdAfAmUmAm | 1868 |
| | AfGfCmUmAmUmUmUmUmCm | | GdCmUfUmUfGmAfCmU*mU*mU | |
| | A*mU*mA | | | |
| IN-544 | irmA*mG*mUmCmAmAfAfGfCm | 1869 | mU*dA*mUfGdAfAdAfAmUmAm | 1870 |
| | UmAmUmUmUmUmCmA*mU*m | | GdCmUfUmUmGmAmCmU*mU*m | |
| | A | | U | |
| IN-545 | irmA*mA*mAmGmUmCmAmAf | 1871 | mU*dA*mUfGdAfAdAfAmUmAm | 1872 |
| | AfGfCmUmAmUmUmUmUmCm | | GdCmUfUmUmGmAmCmU*mU*m | |
| | A*mU*mA | | U | |
| IN-546 | mA*mG*mUmCmAmAfAfGfCm | 1873 | mU*fA*mUmGfAfAmAfAmUmAm | 1874 |
| | UmAmUmUmUmUmCmA*mU*ir | | GmCmUfUmUmGmAmCmU*mU* | |
| | mA | | mU | |

[0376] The GalNAc conjugates were synthesized and conjugated to a solid support (CPG or PS). The GalNAc conjugated siRNA was synthesized with the GalNAc-CPG or GalNAc-PS by Suzhou Biosyntech Co., Ltd. The synthesis of targeting ligands in Formulae 1-33 was as described in WO2022266753A1. The dsRNAi agent of Formula 5, formed by linking the dsRNA in Table 1 and Table 2 with the targeting ligand, is named “duplex number-L5”.

### Example 2. In Vitro Activity Detection Method of siRNA

### 2.1 Real-Time Quantitative Polymerase Chain Reaction (Rt-PCR)

### 2.1.1 Cell Culture and Transfection

[0377] Hep3B cells were cultured at 37° C. using MEM medium (Gibco) supplemented with 10% Fetal Bovine Serum (FBS, Gibco), penicillin, and streptomycin (Gibco) at 5% CO₂. Hep3B cells were resuspended using trypsin digestion after cell growth had nearly covered the whole culture flask. The density of the resuspended cells was adjusted and cells were seeded in a 96-well plate at 1.5×10⁴ cells/well. siRNA transfection complex was obtained by mixing Opti-MEM (Gibco) containing 0.3 μl/well of Lipofectamine RNAiMAX (Thermo) with siRNA at a 1:1 ratio. After the cells were cultured for a certain time, mRNA was extracted using Dynabeads mRNA Isolation Kit (Thermo) according to the instructions and was eluted with 20 μl RNase-free H₂O at 80° C. for 5 minutes. 15 μl supernatant was quickly transferred to a new 96-well-plate on a magnetic stand. The heating process was completed by a BIO-RAD T100 Thermal Cycler PCR instrument.

### 2.1.2 Real-Time Quantitative Polymerase Chain Reaction (PCR)

[0378] The cDNA synthesis and real-time fluorescence quantitative PCR were performed using the One Step PCR method. Relative mRNA levels of INHBE and GAPDH (glyceraldehyde-3-phosphate dehydrogenase) were measured using the ΔΔCt method.

[0379] LightCycler 480 II (Roche) was used for the reaction. The reaction conditions were (1) reverse transcription at 50° C. for 3 minutes, (2) pre-denaturation at 95° C. for 30 seconds; (3) denaturation at 95° C. for 10 seconds, and annealing extension at 60° C. for 30 seconds. Step (3) was repeated for 40 cycles. The results were normalized to blank control to obtain the relative mRNAlevel and knockdown efficacy. The IC50 was obtained by four-parameter fitting using GraphPad Prism software. IN-Ref2m-L96 is the dsRNAi agent formed by linking the dsRNA of IN-Ref2m with L96. The structure and preparation of L96 is described in WO2014089313A1.

[0380] The sequences of NC, NCm, IN-Ref1˜IN-Ref9, IN-Ref1m, IN-Ref2m and IN-Ref8m, based on WO2023003922A1, are shown in Table 3 below.

TABLE 3
Sequences of negative control (NC) and Ref1-Ref8

| | | SEQ | | SEQ |
|---|---|---|---|---|
| | | ID | | ID |
| Duplex | Sense Strand Sequences 5′ to 3′ | NO: | Antisense Strand Sequences 5′ to 3′ | NO: |
| NC | AAUUCUCCGAACGUGUCACGU | 1591 | ACGUGACACGUUCGGAGAAUU | 1592 |
| IN-Ref1 | ACCAGUCGUCCCAGAAUAACU | 1593 | AGUUAUTCUGGGACGACUGGUCA | 1594 |
| IN-Ref2 | ACCAGUCGUCCCAGAAUAACU | 1595 | AGUUAUTCUGGGACGACUGGUCU | 1596 |
| IN-Ref3 | CCAGAAUAACUCAUCCUCCAU | 1597 | ATGGAGGAUGAGUUAUUCUGGGA | 1598 |
| IN-Ref4 | CUGUCACAGACUCCACUUCAU | 1599 | AUGAAGTGGAGUCUGUGACAGUA | 1600 |
| IN-Ref5 | UGUCACAGACUCCACUUCAGU | 1601 | ACUGAAGUGGAGUCUGUGACAGU | 1602 |
| IN-Ref6 | CUUUGCUUGAGGAUCUUCCGU | 1603 | ACGGAAGAUCCTCAAGCAAAGAG | 1604 |
| IN-Ref7 | AAUGGGCACUUUCUUGUCUGU | 1605 | ACAGACAAGAAAGUGCCCAUUUG | 1606 |
| IN-Ref8 | GACAAGCAUUUAUACUUUCUU | 1607 | AAGAAAGUAUAAAUGCUUGUCUC | 1608 |
| IN-Ref9 | ACAAGCAUUUAUACUUUCUUU | 1609 | AAAGAAAGUAUAAAUGCUUGUCU | 1610 |
| IN- | mA*mC*mCmAmGmUmCmGfUfC | 1611 | mA*dG*mUmUdAmUdTmCmUmGmG | 1612 |
| Ref1m | fCmCmAmGmAmAmUmAmAmC | | dGmAfCmGmAmCmUmGmGmU*mC* | |
| | mU | | mA | |
| IN- | mA*mC*mCmAmGmUmCmGfUfC | 1613 | mA*dG*mUmUdAmUdTmCmUmGmG | 1614 |
| Ref2m | fCmCmAmGmAmAmUmAmAmC | | dGmAfCmGmAmCmUmGmGmU*mC* | |
| | mU | | mU | |
| IN- | mG*mA*mCmAmAmGmCmAfUf | 1615 | mA*dA*mGmAdAmAdGmUmAmUmA | 1616 |
| Ref8m | UfUmAmUmAmCmUmUmUmCm | | dAmAfUmGmCmUmUmGmUmC*mU* | |
| | UmU | | mC | |
| NCm | mA*fA*mUfUmCfUmCfCmGmAm | 1617 | mA*mC*mGmUfGfAfCfAfCfGmUmU | 1618 |
| | AfCmGfUmGfUmCfAmC*mG*mU | | mCmGmGmAmGmAmA | |

[0381] The test results are shown in FIGS. 1-4, 5A and 5B. Table 4 shows the results of IC50 determination of siRNAs and Bottom (maximum inhibition rate). “NC” means negative control. “NA” means not applicable. The numbers or letters after the decimal point in the duplex number represent different assay batches. Batch 1, batch 2 and batch 3 all involve human INHBE, and other batches also involve human INHBE. Table 5a shows the relative activities obtained after normalization by IC50 values using IN-Ref8 as the standard. Table 5b shows the inhibition rates of IN-Ref8 and IN-Ref8m at different concentrations.

TABLE 4

| | | | | Maximum |
|---|---|---|---|---|
| Duplex | IC50 (nM) | Duplex | IC50 (nM) | inhibition rate |
| IN-036.1 | 0.007 | IN-499.a | 0.04034 | 85.86% |
| IN-043.1 | 0.009 | IN-501.a | 0.06744 | 90.14% |
| IN-044.1 | 0.011 | IN-502.a | 0.0418 | 82.51% |
| IN-106.1 | 0.008 | IN-533.a | 0.03161 | 84.68% |
| IN-Ref2.1 | 0.008 | IN-529.a | 0.04679 | 79.06% |
| IN-Ref8.1 | 0.004 | IN-535.a | 0.02976 | 79.63% |
| IN-091.1 | 0.013 | IN-518.a | 0.0448 | 82.67% |
| IN-Ref8.2 | 0.011 | IN-519.a | 0.04175 | 65.44% |
| IN-168.2 | 0.009 | IN-523.a | 0.06287 | 53.20% |
| IN-176.2 | 0.006 | IN-Ref2m.a | 0.03862 | 88.78% |
| IN-189.2 | 0.004 | IN-505.b | 0.1964 | 72.75% |
| IN-202.2 | 0.009 | IN-510.b | 0.07662 | 55.36% |
| IN-209.2 | 0.019 | IN-496.b | 0.1935 | 70.50% |
| IN-221.2 | 0.01 | IN-544.b | 0.0366 | 76.76% |
| IN-222.2 | 0.029 | IN-545.b | 0.02449 | 75.52% |
| IN-Ref2.2 | 0.016 | IN-Ref2m.b | 0.04379 | 88.57% |
| IN-Ref8.3 | 0.013 | IN-546.c | 0.01433 | 85.07% |
| NC | NA | IN-497.c | 0.03111 | 91.73% |
| — | — | IN-498.c | 0.03516 | 84.71% |
| — | — | IN-Ref2m.c | 0.04379 | 88.57% |

TABLE 5a

| Duplex | Relative activity |
|---|---|
| IN-004 | 3.00% |
| IN-020 | 12.87% |
| IN-022 | 4.80% |
| IN-036 | 57.14% |
| IN-043 | 44.44% |
| IN-044 | 36.36% |
| IN-106 | 50.00% |
| IN-091 | 100.00% |
| IN-168 | 144.44% |
| IN-176 | 216.67% |
| IN-189 | 325.00% |
| IN-202 | 144.44% |
| IN-209 | 68.42% |
| IN-221 | 130.00% |
| IN-222 | 44.83% |
| IN-225 | 22.10% |
| IN-Ref2 | 81.25% |
| IN-Ref8 | 100.00% |

TABLE 5b

| | 100 nM inhibition | | 2 nM inhibition | | 0.04 nM inhibition | |
|---|---|---|---|---|---|---|
| Duplex | rate (%) | | rate (%) | | rate (%) | |
| IN-Ref8 | 88.54 | 86.83 | 90.09 | 90.82 | 73.11 | 73.67 |
| IN-Ref8m | 70.48 | 66.55 | 68.03 | 73.85 | 13.85 | 10.81 |

### 2.2 Reporter Gene Assay

[0382] SK-Hep-1-PsiCheck-INHBE cells containing the full-length INHBE mRNA sequence and luciferase gene were used for detection. Cells were cultured using MEM medium (Gibco) supplemented with 10% FBS (Gibco), 1 μg/ml puromycin, and penicillin and streptomycin (Gibco) at 5% CO₂, 37° C., and resuspended after trypsin digestion after cell growth had nearly covered the whole culture flask. The density of the resuspended cells was adjusted and cells were seeded in a 96-well plate at 1.5×10⁴ cells/well, and siRNA transfection complex was added at the same time. The siRNA transfection complex was obtained by mixing Opti-MEM (Gibco) containing 0.3 μl/well of Lipofectamine RNAiMAX (Thermo) with siRNA at a 1:1 ratio. Cells were lysed after a period of time of culture and the Renilla substrate (Vazyme) was added for fluorescence activity detection.

[0383] The test results are shown in FIGS. 6-24. Except for FIG. 9 and FIG. 16 which were measured in mouse INHBE, and the rest were measured in human INHBE. Table 6 and Table 8 show the IC50 assay results of siRNAs (fitted using the four-parameter method in GraphPad Prism) and the inhibition rates normalized to the blank control group. Batches 4 and 5 both involved human INHBE, batch 6 involved mouse INHBE, and other batches also involved human INHBE. Table 7 shows the IC50 values obtained after normalizing the inhibition rate at the same concentration using IN-Ref8 as the standard. Table 9 shows the inhibition rates of IN-Ref8 and IN-Ref8m at different concentrations.

TABLE 6

| Duplex | IC50 (nM) |
|---|---|
| IN-004.4 | 0.008 |
| IN-007.4 | 0.013 |
| IN-016.4 | 0.001 |
| IN-020.4 | 0.003 |
| IN-022.4 | 0.017 |
| IN-036.4 | 0.005 |
| IN-043.4 | 0.019 |
| IN-044.4 | 0.001 |
| IN-091.4 | 0.006 |
| IN-106.4 | 0.018 |
| IN-Ref2.4 | 0.03 |
| IN-Ref8.4 | 0.024 |
| IN-168.5 | 0.017 |
| IN-176.5 | 0.004 |
| IN-189.5 | 0.003 |
| IN-202.5 | 0.009 |
| IN-209.5 | 0.018 |
| IN-221.5 | 0.029 |
| IN-222.5 | 0.037 |
| IN-225.5 | 0.021 |
| IN-227.5 | 0.002 |
| IN-228.5 | 0.03 |
| IN-Ref2.5 | 0.018 |
| IN-Ref8.5 | 0.025 |
| IN-036.6 | 0.03 |
| IN-043.6 | 0.04 |
| IN-044.6 | 0.11 |
| IN-Ref2.6 | 0.08 |
| IN-Ref8.6 | NA |
| NC | NA |

TABLE 7

| Duplex | IC50 (nM) |
|---|---|
| IN-004 | 0.008 |
| IN-007 | 0.0134 |
| IN-016 | 0.0006 |
| IN-020 | 0.0027 |
| IN-022 | 0.0167 |
| IN-036 | 0.0052 |
| IN-043 | 0.0188 |
| IN-044 | 0.0013 |
| IN-091 | 0.0055 |
| IN-106 | 0.0179 |
| IN-168 | 0.0178 |
| IN-176 | 0.0113 |
| IN-189 | 0.0081 |
| IN-202 | 0.0119 |
| IN-209 | 0.0174 |
| IN-221 | 0.0296 |
| IN-222 | 0.0363 |
| IN-225 | 0.0149 |
| IN-227 | 0.0109 |
| IN-228 | 0.028 |
| IN-Ref2 | 0.0295 |
| IN-Ref8 | 0.0238 |

TABLE 8

| | | Maximum | | | Maximum |
|---|---|---|---|---|---|
| | | inhibition | | IC50 | inhibition |
| Duplex | IC50 (nM) | rate (%) | Duplex | (nM) | rate (%) |
| IN-518.d | 0.5308 | 86.45 | IN-Ref2m.i | 0.1234 | 80.96 |
| IN-519.d | 0.3315 | 85.45 | IN-510.j | 0.2742 | 74.54 |
| IN-523.d | 0.5822 | 49.41 | IN-511.j | 1.433 | 60.99 |
| IN-Ref2m.d | 0.08943 | 75.95 | IN-512.j | 0.9971 | 81.15 |
| IN-503.e | 0.2849 | 50.49 | IN-513.j | 1.431 | 60.89 |
| IN-504.e | 0.2148 | 62.89 | IN-Ref2m.j | 0.1321 | 66.81 |
| IN-505.e | 0.1685 | 73.85 | IN-514.k | 1.258 | 54.21 |
| IN-506.e | 1.064 | 64.92 | IN-515.k | 0.4826 | 68.16 |
| IN-507.e | 0.3262 | 64.08 | IN-516.k | 0.7253 | 87.68 |
| IN-508.e | ~1.460 | 54.86 | IN-517.k | 0.3504 | 77.17 |
| IN-536.e | 0.006015 | 88.40 | IN-486.k | 0.1323 | 79.33 |
| IN-537.e | 0.007107 | 89.11 | IN-487.k | 0.09262 | 83.95 |
| IN-538.e | 0.01333 | 87.68 | IN-488.k | 0.2625 | 76.84 |
| IN-539.e | 0.01698 | 89.00 | IN-492.k | 0.08549 | 88.29 |
| IN-540.e | 0.008467 | 89.36 | IN-494.k | 0.1097 | 88.80 |
| IN-541.e | 0.006741 | 89.56 | IN-495.k | 0.07071 | 87.76 |
| IN-542.e | 0.008483 | 88.14 | IN-496.k | 0.06723 | 88.05 |
| IN-543.e | 0.006184 | 86.99 | IN-524.k | 0.3675 | 52.56 |
| IN-Ref2m.e | 0.08503 | 71.42 | IN-525.k | 0.1567 | 64.17 |
| IN-239.f | 0.03846 | 87.19 | IN-526.k | 0.1135 | 67.66 |
| IN-240.f | 0.02503 | 85.94 | IN-527.k | 0.6912 | 41.73 |
| IN-499.f | 0.1218 | 72.92 | IN-528.k | 0.3194 | 39.21 |
| IN-500.f | 0.09278 | 70.30 | IN-Ref2m.k | 0.08025 | 70.00 |
| IN-501.f | 0.1427 | 75.78 | IN-189.1 | 0.01543 | 90.82 |
| IN-502.f | 0.03788 | 74.96 | IN-529.1 | 0.1083 | 78.29 |
| IN-Ref2m.f | 0.1133 | 77.94 | IN-530.1 | 0.08113 | 80.59 |
| IN-545.g | 0.07606 | 93.00 | IN-531.1 | 0.1237 | 81.02 |
| IN-Ref2m.g | 0.1045 | 73.66 | IN-532.1 | 0.09852 | 86.28 |
| IN-544.h | 0.03637 | 87.68 | IN-533.1 | 0.03468 | 93.26 |
| IN-546.h | 0.05053 | 85.69 | IN-534.1 | 0.1176 | 90.51 |
| IN-496.h | 0.1376 | 85.30 | IN-535.1 | 0.08164 | 85.04 |
| IN-498.h | 0.1177 | 85.97 | IN-221.1 | 0.0123 | 96.31 |
| IN-509.h | 0.4069 | 67.45 | IN-520.1 | 1.871 | 42.45 |
| IN-Ref2m.h | 0.1439 | 66.30 | IN-521.1 | 0.9813 | 56.78 |
| IN-Ref2m- | 0.2004 | 60.08 | IN-522.1 | 0.1135 | 66.84 |
| L96.h | | | | | |
| IN-497.i | 0.1584 | 91.48 | IN-Ref2m.1 | 0.2218 | 74.20 |

TABLE 9

| | 10 nM inhibition | | 0.1 nM inhibition | | 0.001 nM inhibition | |
|---|---|---|---|---|---|---|
| Duplex | rate | | rate | | rate | |
| IN-Ref8 | 91.39% | 91.53% | 70.81% | 71.56% | 4.6% | 1.08% |
| IN-Ref8m | 35% | 36.53% | 1.82% | 1.04% | 0.31% | −3.95% |

### Example 3. In Vitro Stability Assay for siRNAs

### 3.1. Stem-Loop PCR

[0384] The Stem-loop method has been widely used to detect the absolute concentration of siRNA and miRNA (Curr Protoc Mol Biol. 2011 July; Chapter 15:Unit 15.10). After designing the corresponding stem-loop primers for different siRNAs and using the primers for reverse transcription, the siRNA concentrations were calculated using rt-PCR with a standard curve. Reverse transcription was performed using the HiScript III 1st Strand cDNA Synthesis Kit (Vazyme), and the process was as follows: (1) Sample pretreatment: (a) 85° C., 5 min; (b) 60° C., 5 min; (2) Reverse transcription according to the manufacturer's protocol; (3) The reaction system was prepared according to the conditions described in the SYBR Green kit (TIANGEN®) and rt-PCR was performed. The reverse transcription was performed by BIO-RAD® T100 Thermal Cycler PCR instrument. The quantitative real-time-PCR was performed by Roche LC480 II.

### 3.1.1 Stability in FBS

[0385] (1) Dilute siRNA to 100 nM using FBS (Gibco, fetal bovine serum) and mark it as the zero point; (2) aliquot 10 μl from the zero point into new sample tubes then incubate at 37° C. for different times; (3) Take out the corresponding samples with different incubation time and put them into liquid nitrogen to freeze quickly, and then store the samples at −80° C. Before the experiment, the samples were thoroughly mixed, using the gradient dilution of samples from the zero point group as the standard curve, and perform the experiment using the Stem-loop PCR method described in 3.1 above.

[0386] The cycle threshold (Ct) values obtained from PCR of the standards at different concentrations were linearly fitted using GraphPad Prism software to obtain a standard curve correlating the standard concentrations with Ct values. The Ct values of the samples at each incubation time point were then back-calculated using the standard curve to obtain the siRNA concentration in the samples. The concentration of the samples at each time point was normalized to the concentration of the 0-hour sample, and the percentage of residual siRNA concentration at each time point relative to the 0-hour sample was calculated. FIG. 25 shows the results of the siRNA serum stability test.

### 3.1.2 Stability in Human Liver S9

[0387] (1) Diluted siRNA with human liver S9 (BioIVT); (2) Incubated samples at 37° C. for different times. (3) Took out the corresponding samples with different incubation times and put them into liquid nitrogen to freeze quickly, and then stored the samples at −80° C. for later use. Performed the experiment using the Stem-loop PCR method described in 3.1 above.

[0388] The Ct values obtained from PCR of the standards at different concentrations were linearly fitted using GraphPad Prism software to obtain a standard curve correlating standard concentrations with Ct values. The Ct values of the samples at each incubation time point were then back-calculated using the standard curve to obtain the siRNA concentration in each sample. The concentration of the samples at each time point was normalized to the concentration of the 0-hour sample, and the percentage of residual siRNA concentration at each time point relative to the 0-hour sample was calculated. FIG. 26 shows the results of the siRNA stability test in human liver S9.

### Example 4. Pharmacokinetic Analysis of siRNA in Liver

[0389] After subcutaneous administration to mice at a dose of 3 mg/kg, livers were taken from mice at specific times. The liver was weighed and homogenized in PBS at 4° C. with a homogenizer (Shanghai JXFSTPRP-64). The siRNA content was detected by Stem-loop PCR as described previously. The siRNA concentration in the liver tissues of the treated mice was determined by back-calculating based on the standard curve. FIG. 27 shows the changes in siRNA content in the liver of each group (3 mice per group) at different time points after administration. FIG. 28 shows the percentage of different siRNA content in the mouse liver, normalized to the siRNA content in the liver tissue of mice (3 mice per group) 7 days after administration.

### Example 5. In Vivo Efficacy of GalNAc-Conjugated INHBE siRNA in Healthy Cynomolgus Monkeys

[0390] To assess the in vivo activity of siRNA targeting INHBE, an in vivo activity assay was performed using healthy cynomolgus monkeys. Pre-dose liver biopsy samples were obtained 24-hour before injection. GalNAc-conjugated siRNAs were diluted using saline and injected subcutaneously on day 1 according to the experimental design. Blank saline was used as a negative control. Liver biopsy was collected on days 14, 28, 42, 56, and 70, respectively. Liver INHBE mRNA level was analyzed by quantitative real-time-PCR by HiScript II One-Step RT-PCR Kit (Vazyme) with total RNA extracted by FastPure Cell/Tissue Total RNA Isolation Kit V2 (Vazyme). The quantitative real-time PCR was performed by Roche LC480 II.

[0391] The obtained test results were standardized using the reference gene (GAPDH) to obtain the relative mRNA levels, and the INHBE mRNA levels of each animal were individually standardized. For individual standardization, at each time point, the average INHBE mRNA level of each animal was divided by the average pre-treatment expression level of that animal to determine the “standardized to pre-treatment” relative expression level. Table 10 shows the mean relative expression level of each group of animals obtained by standardizing each animal's liver tissue mRNA levels to their own pre-treatment levels. “Vehicle” indicates the blank control.

TABLE 10

| RNAi | Pre- treatment | 14 days | 28 days | 42 days | 56 days | 70 days |
|---|---|---|---|---|---|---|
| IN-546-L5 | 100.00% | 28.18% | 25.93% | 40.70% | 31.20% | 37.50% |
| IN-497-L5 | 100.00% | 18.29% | 30.10% | 50.24% | 29.93% | 36.20% |
| IN-498-L5 | 100.00% | 14.53% | 11.62% | 45.20% | 21.86% | 20.54% |
| Vehicle | 100.00% | 153.97% | 334.31% | 345.62% | 294.62% | 313.42% |

[0392] Although this invention is described in detail with reference to embodiments thereof, these embodiments are offered to illustrate but not to limit the invention. It is possible to make other embodiments that employ the principles of the invention and that fall within its spirit and scope as defined by the claims appended hereto.

[0393] The contents of all documents and references cited herein are hereby incorporated by reference in their entirety.

The application's sequence listing, which the Patent Office published only in electronic form, follows.

SEQUENCE LISTING (1875 sequences)

SEQ ID NO: 1 - RNA, 19 nt, synthetic construct
  source 1..19: mol_type = other RNA
gtgagggtcaagcacagct

SEQ ID NO: 2 - RNA, 21 nt, synthetic construct
  source 1..21: mol_type = other RNA
agctgtgcttgaccctcacag

SEQ ID NO: 3 - RNA, 19 nt, synthetic construct
  source 1..19: mol_type = other RNA
gagggtcaagcacagctat

SEQ ID NO: 4 - RNA, 21 nt, synthetic construct
  source 1..21: mol_type = other RNA
atagctgtgcttgaccctcac

SEQ ID NO: 5 - RNA, 19 nt, synthetic construct
  source 1..19: mol_type = other RNA
gggtcaagcacagctatcc

SEQ ID NO: 6 - RNA, 21 nt, synthetic construct
  source 1..21: mol_type = other RNA
ggatagctgtgcttgaccctc

SEQ ID NO: 7 - RNA, 19 nt, synthetic construct
  source 1..19: mol_type = other RNA
ggtcaagcacagctatcca

SEQ ID NO: 8 - RNA, 21 nt, synthetic construct
  source 1..21: mol_type = other RNA
tggatagctgtgcttgaccct

SEQ ID NO: 9 - RNA, 19 nt, synthetic construct
  source 1..19: mol_type = other RNA
gtcaagcacagctatccat

SEQ ID NO: 10 - RNA, 21 nt, synthetic construct
  source 1..21: mol_type = other RNA
atggatagctgtgcttgaccc

SEQ ID NO: 11 - RNA, 19 nt, synthetic construct
  source 1..19: mol_type = other RNA
tcaagcacagctatccatc

SEQ ID NO: 12 - RNA, 21 nt, synthetic construct
  source 1..21: mol_type = other RNA
gatggatagctgtgcttgacc

SEQ ID NO: 13 - RNA, 19 nt, synthetic construct
  source 1..19: mol_type = other RNA
caagcacagctatccatca

SEQ ID NO: 14 - RNA, 21 nt, synthetic construct
  source 1..21: mol_type = other RNA
tgatggatagctgtgcttgac

SEQ ID NO: 15 - RNA, 19 nt, synthetic construct
  source 1..19: mol_type = other RNA
aagcacagctatccatcag

SEQ ID NO: 16 - RNA, 21 nt, synthetic construct
  source 1..21: mol_type = other RNA
ctgatggatagctgtgcttga

SEQ ID NO: 17 - RNA, 19 nt, synthetic construct
  source 1..19: mol_type = other RNA
agcacagctatccatcaga

SEQ ID NO: 18 - RNA, 21 nt, synthetic construct
  source 1..21: mol_type = other RNA
tctgatggatagctgtgcttg

SEQ ID NO: 19 - RNA, 19 nt, synthetic construct
  source 1..19: mol_type = other RNA
gcacagctatccatcagat

SEQ ID NO: 20 - RNA, 21 nt, synthetic construct
  source 1..21: mol_type = other RNA
atctgatggatagctgtgctt

SEQ ID NO: 21 - RNA, 19 nt, synthetic construct
  source 1..19: mol_type = other RNA
cacagctatccatcagatg

SEQ ID NO: 22 - RNA, 21 nt, synthetic construct
  source 1..21: mol_type = other RNA
catctgatggatagctgtgct

SEQ ID NO: 23 - RNA, 19 nt, synthetic construct
  source 1..19: mol_type = other RNA
acagctatccatcagatga

SEQ ID NO: 24 - RNA, 21 nt, synthetic construct
  source 1..21: mol_type = other RNA
tcatctgatggatagctgtgc

SEQ ID NO: 25 - RNA, 19 nt, synthetic construct
  source 1..19: mol_type = other RNA
cagctatccatcagatgat

SEQ ID NO: 26 - RNA, 21 nt, synthetic construct
  source 1..21: mol_type = other RNA
atcatctgatggatagctgtg

SEQ ID NO: 27 - RNA, 19 nt, synthetic construct
  source 1..19: mol_type = other RNA
agctatccatcagatgatc

SEQ ID NO: 28 - RNA, 21 nt, synthetic construct
  source 1..21: mol_type = other RNA
gatcatctgatggatagctgt

SEQ ID NO: 29 - RNA, 19 nt, synthetic construct
  source 1..19: mol_type = other RNA
gctatccatcagatgatct

SEQ ID NO: 30 - RNA, 21 nt, synthetic construct
  source 1..21: mol_type = other RNA
agatcatctgatggatagctg

SEQ ID NO: 31 - RNA, 19 nt, synthetic construct
  source 1..19: mol_type = other RNA
ctatccatcagatgatcta

SEQ ID NO: 32 - RNA, 21 nt, synthetic construct
  source 1..21: mol_type = other RNA
tagatcatctgatggatagct

SEQ ID NO: 33 - RNA, 19 nt, synthetic construct
  source 1..19: mol_type = other RNA
atccatcagatgatctact

SEQ ID NO: 34 - RNA, 21 nt, synthetic construct
  source 1..21: mol_type = other RNA
agtagatcatctgatggatag

SEQ ID NO: 35 - RNA, 19 nt, synthetic construct
  source 1..19: mol_type = other RNA
tccatcagatgatctactt

SEQ ID NO: 36 - RNA, 21 nt, synthetic construct
  source 1..21: mol_type = other RNA
aagtagatcatctgatggata

SEQ ID NO: 37 - RNA, 19 nt, synthetic construct
  source 1..19: mol_type = other RNA
ccatcagatgatctacttt

SEQ ID NO: 38 - RNA, 21 nt, synthetic construct
  source 1..21: mol_type = other RNA
aaagtagatcatctgatggat

SEQ ID NO: 39 - RNA, 19 nt, synthetic construct
  source 1..19: mol_type = other RNA
catcagatgatctactttc

SEQ ID NO: 40 - RNA, 21 nt, synthetic construct
  source 1..21: mol_type = other RNA
gaaagtagatcatctgatgga

SEQ ID NO: 41 - RNA, 19 nt, synthetic construct
  source 1..19: mol_type = other RNA
atcagatgatctactttca

SEQ ID NO: 42 - RNA, 21 nt, synthetic construct
  source 1..21: mol_type = other RNA
tgaaagtagatcatctgatgg

SEQ ID NO: 43 - RNA, 19 nt, synthetic construct
  source 1..19: mol_type = other RNA
cagatgatctactttcagc

SEQ ID NO: 44 - RNA, 21 nt, synthetic construct
  source 1..21: mol_type = other RNA
gctgaaagtagatcatctgat

SEQ ID NO: 45 - RNA, 19 nt, synthetic construct
  source 1..19: mol_type = other RNA
gatgatctactttcagcct

SEQ ID NO: 46 - RNA, 21 nt, synthetic construct
  source 1..21: mol_type = other RNA
aggctgaaagtagatcatctg

SEQ ID NO: 47 - RNA, 19 nt, synthetic construct
  source 1..19: mol_type = other RNA
atgatctactttcagcctt

SEQ ID NO: 48 - RNA, 21 nt, synthetic construct
  source 1..21: mol_type = other RNA
aaggctgaaagtagatcatct

SEQ ID NO: 49 - RNA, 19 nt, synthetic construct
  source 1..19: mol_type = other RNA
ttcctgagtcccagacaat

SEQ ID NO: 50 - RNA, 21 nt, synthetic construct
  source 1..21: mol_type = other RNA
attgtctgggactcaggaagg

SEQ ID NO: 51 - RNA, 19 nt, synthetic construct
  source 1..19: mol_type = other RNA
tcctgagtcccagacaata

SEQ ID NO: 52 - RNA, 21 nt, synthetic construct
  source 1..21: mol_type = other RNA
tattgtctgggactcaggaag

SEQ ID NO: 53 - RNA, 19 nt, synthetic construct
  source 1..19: mol_type = other RNA
tgagtcccagacaatagaa

SEQ ID NO: 54 - RNA, 21 nt, synthetic construct
  source 1..21: mol_type = other RNA
ttctattgtctgggactcagg

SEQ ID NO: 55 - RNA, 19 nt, synthetic construct
  source 1..19: mol_type = other RNA
gtcccagacaatagaagac

SEQ ID NO: 56 - RNA, 21 nt, synthetic construct
  source 1..21: mol_type = other RNA
gtcttctattgtctgggactc

SEQ ID NO: 57 - RNA, 19 nt, synthetic construct
  source 1..19: mol_type = other RNA
caatagaagacaggtggct

SEQ ID NO: 58 - RNA, 21 nt, synthetic construct
  source 1..21: mol_type = other RNA
agccacctgtcttctattgtc

SEQ ID NO: 59 - RNA, 19 nt, synthetic construct
  source 1..19: mol_type = other RNA
atagaagacaggtggctgt

SEQ ID NO: 60 - RNA, 21 nt, synthetic construct
  source 1..21: mol_type = other RNA
acagccacctgtcttctattg

SEQ ID NO: 61 - RNA, 19 nt, synthetic construct
  source 1..19: mol_type = other RNA
aggtgtggcagtggtgtct

SEQ ID NO: 62 - RNA, 21 nt, synthetic construct
  source 1..21: mol_type = other RNA
agacaccactgccacacctac

SEQ ID NO: 63 - RNA, 19 nt, synthetic construct
  source 1..19: mol_type = other RNA
cattggcccccagcaatca

SEQ ID NO: 64 - RNA, 21 nt, synthetic construct
  source 1..21: mol_type = other RNA
tgattgctgggggccaatgag

SEQ ID NO: 65 - RNA, 19 nt, synthetic construct
  source 1..19: mol_type = other RNA
agctagccaagcagcaaat

SEQ ID NO: 66 - RNA, 21 nt, synthetic construct
  source 1..21: mol_type = other RNA
atttgctgcttggctagctcc

SEQ ID NO: 67 - RNA, 19 nt, synthetic construct
  source 1..19: mol_type = other RNA
tagccaagcagcaaatcct

SEQ ID NO: 68 - RNA, 21 nt, synthetic construct
  source 1..21: mol_type = other RNA
aggatttgctgcttggctagc

SEQ ID NO: 69 - RNA, 19 nt, synthetic construct
  source 1..19: mol_type = other RNA
accagtcgtcccagaataa

SEQ ID NO: 70 - RNA, 21 nt, synthetic construct
  source 1..21: mol_type = other RNA
ttattctgggacgactggtca

SEQ ID NO: 71 - RNA, 19 nt, synthetic construct
  source 1..19: mol_type = other RNA
cagtcgtcccagaataact

SEQ ID NO: 72 - RNA, 21 nt, synthetic construct
  source 1..21: mol_type = other RNA
agttattctgggacgactggt

SEQ ID NO: 73 - RNA, 19 nt, synthetic construct
  source 1..19: mol_type = other RNA
agtcgtcccagaataactc

SEQ ID NO: 74 - RNA, 21 nt, synthetic construct
  source 1..21: mol_type = other RNA
gagttattctgggacgactgg

SEQ ID NO: 75 - RNA, 19 nt, synthetic construct
  source 1..19: mol_type = other RNA
tcgtcccagaataactcat

SEQ ID NO: 76 - RNA, 21 nt, synthetic construct
  source 1..21: mol_type = other RNA
atgagttattctgggacgact

SEQ ID NO: 77 - RNA, 19 nt, synthetic construct
  source 1..19: mol_type = other RNA
ggaatggggaggaggtcat

SEQ ID NO: 78 - RNA, 21 nt, synthetic construct
  source 1..21: mol_type = other RNA
atgacctcctccccattccct

SEQ ID NO: 79 - RNA, 19 nt, synthetic construct
  source 1..19: mol_type = other RNA
gaggtcatcagctttgcta

SEQ ID NO: 80 - RNA, 21 nt, synthetic construct
  source 1..21: mol_type = other RNA
tagcaaagctgatgacctcct

SEQ ID NO: 81 - RNA, 19 nt, synthetic construct
  source 1..19: mol_type = other RNA
ggtcatcagctttgctact

SEQ ID NO: 82 - RNA, 21 nt, synthetic construct
  source 1..21: mol_type = other RNA
agtagcaaagctgatgacctc

SEQ ID NO: 83 - RNA, 19 nt, synthetic construct
  source 1..19: mol_type = other RNA
gtcatcagctttgctactg

SEQ ID NO: 84 - RNA, 21 nt, synthetic construct
  source 1..21: mol_type = other RNA
cagtagcaaagctgatgacct

SEQ ID NO: 85 - RNA, 19 nt, synthetic construct
  source 1..19: mol_type = other RNA
tcatcagctttgctactgt

SEQ ID NO: 86 - RNA, 21 nt, synthetic construct
  source 1..21: mol_type = other RNA
acagtagcaaagctgatgacc

SEQ ID NO: 87 - RNA, 19 nt, synthetic construct
  source 1..19: mol_type = other RNA
catcagctttgctactgtc

SEQ ID NO: 88 - RNA, 21 nt, synthetic construct
  source 1..21: mol_type = other RNA
gacagtagcaaagctgatgac

SEQ ID NO: 89 - RNA, 19 nt, synthetic construct
  source 1..19: mol_type = other RNA
gctttgctactgtcacaga

SEQ ID NO: 90 - RNA, 21 nt, synthetic construct
  source 1..21: mol_type = other RNA
tctgtgacagtagcaaagctg

SEQ ID NO: 91 - RNA, 19 nt, synthetic construct
  source 1..19: mol_type = other RNA
tttgctactgtcacagact

SEQ ID NO: 92 - RNA, 21 nt, synthetic construct
  source 1..21: mol_type = other RNA
agtctgtgacagtagcaaagc

SEQ ID NO: 93 - RNA, 19 nt, synthetic construct
  source 1..19: mol_type = other RNA
actgtcacagactccactt

SEQ ID NO: 94 - RNA, 21 nt, synthetic construct
  source 1..21: mol_type = other RNA
aagtggagtctgtgacagtag

SEQ ID NO: 95 - RNA, 19 nt, synthetic construct
  source 1..19: mol_type = other RNA
acccttcctggcactcttt

SEQ ID NO: 96 - RNA, 21 nt, synthetic construct
  source 1..21: mol_type = other RNA
aaagagtgccaggaagggtgg

SEQ ID NO: 97 - RNA, 19 nt, synthetic construct
  source 1..19: mol_type = other RNA
cttcctggcactctttgct

SEQ ID NO: 98 - RNA, 21 nt, synthetic construct
  source 1..21: mol_type = other RNA
agcaaagagtgccaggaaggg

SEQ ID NO: 99 - RNA, 19 nt, synthetic construct
  source 1..19: mol_type = other RNA
gcactctttgcttgaggat

SEQ ID NO: 100 - RNA, 21 nt, synthetic construct
  source 1..21: mol_type = other RNA
atcctcaagcaaagagtgcca

SEQ ID NO: 101 - RNA, 19 nt, synthetic construct
  source 1..19: mol_type = other RNA
actctttgcttgaggatct

SEQ ID NO: 102 - RNA, 21 nt, synthetic construct
  source 1..21: mol_type = other RNA
agatcctcaagcaaagagtgc

SEQ ID NO: 103 - RNA, 19 nt, synthetic construct
  source 1..19: mol_type = other RNA
ctctttgcttgaggatctt

SEQ ID NO: 104 - RNA, 21 nt, synthetic construct
  source 1..21: mol_type = other RNA
aagatcctcaagcaaagagtg

SEQ ID NO: 105 - RNA, 19 nt, synthetic construct
  source 1..19: mol_type = other RNA
gctggcataccttaactct

SEQ ID NO: 106 - RNA, 21 nt, synthetic construct
  source 1..21: mol_type = other RNA
agagttaaggtatgccagccc

SEQ ID NO: 107 - RNA, 19 nt, synthetic construct
  source 1..19: mol_type = other RNA
agtggcttgaggggtgaga

SEQ ID NO: 108 - RNA, 21 nt, synthetic construct
  source 1..21: mol_type = other RNA
tctcacccctcaagccactag

SEQ ID NO: 109 - RNA, 19 nt, synthetic construct
  source 1..19: mol_type = other RNA
cttgaggggtgagaagtct

SEQ ID NO: 110 - RNA, 21 nt, synthetic construct
  source 1..21: mol_type = other RNA
agacttctcacccctcaagcc

SEQ ID NO: 111 - RNA, 19 nt, synthetic construct
  source 1..19: mol_type = other RNA
agtctggtgtcctgaaact

SEQ ID NO: 112 - RNA, 21 nt, synthetic construct
  source 1..21: mol_type = other RNA
agtttcaggacaccagacttc

SEQ ID NO: 113 - RNA, 19 nt, synthetic construct
  source 1..19: mol_type = other RNA
ctggtgtcctgaaactgca

SEQ ID NO: 114 - RNA, 21 nt, synthetic construct
  source 1..21: mol_type = other RNA
tgcagtttcaggacaccagac

SEQ ID NO: 115 - RNA, 19 nt, synthetic construct
  source 1..19: mol_type = other RNA
gtgtcctgaaactgcaact

SEQ ID NO: 116 - RNA, 21 nt, synthetic construct
  source 1..21: mol_type = other RNA
agttgcagtttcaggacacca

SEQ ID NO: 117 - RNA, 19 nt, synthetic construct
  source 1..19: mol_type = other RNA
tgtcctgaaactgcaacta

SEQ ID NO: 118 - RNA, 21 nt, synthetic construct
  source 1..21: mol_type = other RNA
tagttgcagtttcaggacacc

SEQ ID NO: 119 - RNA, 19 nt, synthetic construct
  source 1..19: mol_type = other RNA
gtcctgaaactgcaactag

SEQ ID NO: 120 - RNA, 21 nt, synthetic construct
  source 1..21: mol_type = other RNA
ctagttgcagtttcaggacac

SEQ ID NO: 121 - RNA, 19 nt, synthetic construct
  source 1..19: mol_type = other RNA
agaaggcaacagcacagtt

SEQ ID NO: 122 - RNA, 21 nt, synthetic construct
  source 1..21: mol_type = other RNA
aactgtgctgttgccttctag

SEQ ID NO: 123 - RNA, 19 nt, synthetic construct
  source 1..19: mol_type = other RNA
aggcaacagcacagttact

SEQ ID NO: 124 - RNA, 21 nt, synthetic construct
  source 1..21: mol_type = other RNA
agtaactgtgctgttgccttc

SEQ ID NO: 125 - RNA, 19 nt, synthetic construct
  source 1..19: mol_type = other RNA
ccttcctagagcttaagat

SEQ ID NO: 126 - RNA, 21 nt, synthetic construct
  source 1..21: mol_type = other RNA
atcttaagctctaggaagggc

SEQ ID NO: 127 - RNA, 19 nt, synthetic construct
  source 1..19: mol_type = other RNA
cttcctagagcttaagatc

SEQ ID NO: 128 - RNA, 21 nt, synthetic construct
  source 1..21: mol_type = other RNA
gatcttaagctctaggaaggg

SEQ ID NO: 129 - RNA, 19 nt, synthetic construct
  source 1..19: mol_type = other RNA
agagcttaagatccgagcc

SEQ ID NO: 130 - RNA, 21 nt, synthetic construct
  source 1..21: mol_type = other RNA
ggctcggatcttaagctctag

SEQ ID NO: 131 - RNA, 19 nt, synthetic construct
  source 1..19: mol_type = other RNA
gagcttaagatccgagcca

SEQ ID NO: 132 - RNA, 21 nt, synthetic construct
  source 1..21: mol_type = other RNA
tggctcggatcttaagctcta

SEQ ID NO: 133 - RNA, 19 nt, synthetic construct
  source 1..19: mol_type = other RNA
gcttaagatccgagccaat

SEQ ID NO: 134 - RNA, 21 nt, synthetic construct
  source 1..21: mol_type = other RNA
attggctcggatcttaagctc

SEQ ID NO: 135 - RNA, 19 nt, synthetic construct
  source 1..19: mol_type = other RNA
cctgcgacccccttatgtt

SEQ ID NO: 136 - RNA, 21 nt, synthetic construct
  source 1..21: mol_type = other RNA
aacataagggggtcgcaggct

SEQ ID NO: 137 - RNA, 19 nt, synthetic construct
  source 1..19: mol_type = other RNA
tgttgcaggcgagaccatt

SEQ ID NO: 138 - RNA, 21 nt, synthetic construct
  source 1..21: mol_type = other RNA
aatggtctcgcctgcaacata

SEQ ID NO: 139 - RNA, 19 nt, synthetic construct
  source 1..19: mol_type = other RNA
cgagaccattacgtagact

SEQ ID NO: 140 - RNA, 21 nt, synthetic construct
  source 1..21: mol_type = other RNA
agtctacgtaatggtctcgcc

SEQ ID NO: 141 - RNA, 19 nt, synthetic construct
  source 1..19: mol_type = other RNA
gagaccattacgtagactt

SEQ ID NO: 142 - RNA, 21 nt, synthetic construct
  source 1..21: mol_type = other RNA
aagtctacgtaatggtctcgc

SEQ ID NO: 143 - RNA, 19 nt, synthetic construct
  source 1..19: mol_type = other RNA
attacgtagacttccagga

SEQ ID NO: 144 - RNA, 21 nt, synthetic construct
  source 1..21: mol_type = other RNA
tcctggaagtctacgtaatgg

SEQ ID NO: 145 - RNA, 19 nt, synthetic construct
  source 1..19: mol_type = other RNA
aggggtaccagctgaatta

SEQ ID NO: 146 - RNA, 21 nt, synthetic construct
  source 1..21: mol_type = other RNA
taattcagctggtacccctcg

SEQ ID NO: 147 - RNA, 19 nt, synthetic construct
  source 1..19: mol_type = other RNA
attgctgcctctttccatt

SEQ ID NO: 148 - RNA, 21 nt, synthetic construct
  source 1..21: mol_type = other RNA
aatggaaagaggcagcaatgc

SEQ ID NO: 149 - RNA, 19 nt, synthetic construct
  source 1..19: mol_type = other RNA
ctttccattctgccgtctt

SEQ ID NO: 150 - RNA, 21 nt, synthetic construct
  source 1..21: mol_type = other RNA
aagacggcagaatggaaagag

SEQ ID NO: 151 - RNA, 19 nt, synthetic construct
  source 1..19: mol_type = other RNA
cctcctcaaagccaacaat

SEQ ID NO: 152 - RNA, 21 nt, synthetic construct
  source 1..21: mol_type = other RNA
attgttggctttgaggaggct

SEQ ID NO: 153 - RNA, 19 nt, synthetic construct
  source 1..19: mol_type = other RNA
cctcaaagccaacaatcct

SEQ ID NO: 154 - RNA, 21 nt, synthetic construct
  source 1..21: mol_type = other RNA
aggattgttggctttgaggag

SEQ ID NO: 155 - RNA, 19 nt, synthetic construct
  source 1..19: mol_type = other RNA
ctcaaagccaacaatcctt

SEQ ID NO: 156 - RNA, 21 nt, synthetic construct
  source 1..21: mol_type = other RNA
aaggattgttggctttgagga

SEQ ID NO: 157 - RNA, 19 nt, synthetic construct
  source 1..19: mol_type = other RNA
cctgccagtacctcctgtt

SEQ ID NO: 158 - RNA, 21 nt, synthetic construct
  source 1..21: mol_type = other RNA
aacaggaggtactggcaggcc

SEQ ID NO: 159 - RNA, 19 nt, synthetic construct
  source 1..19: mol_type = other RNA
tctcctctacctggatcat

SEQ ID NO: 160 - RNA, 21 nt, synthetic construct
  source 1..21: mol_type = other RNA
atgatccaggtagaggagaga

SEQ ID NO: 161 - RNA, 19 nt, synthetic construct
  source 1..19: mol_type = other RNA
ctcctctacctggatcata

SEQ ID NO: 162 - RNA, 21 nt, synthetic construct
  source 1..21: mol_type = other RNA
tatgatccaggtagaggagag

SEQ ID NO: 163 - RNA, 19 nt, synthetic construct
  source 1..19: mol_type = other RNA
tcctctacctggatcataa

SEQ ID NO: 164 - RNA, 21 nt, synthetic construct
  source 1..21: mol_type = other RNA
ttatgatccaggtagaggaga

SEQ ID NO: 165 - RNA, 19 nt, synthetic construct
  source 1..19: mol_type = other RNA
cctctacctggatcataat

SEQ ID NO: 166 - RNA, 21 nt, synthetic construct
  source 1..21: mol_type = other RNA
attatgatccaggtagaggag

SEQ ID NO: 167 - RNA, 19 nt, synthetic construct
  source 1..19: mol_type = other RNA
cctggatcataatggcaat

SEQ ID NO: 168 - RNA, 21 nt, synthetic construct
  source 1..21: mol_type = other RNA
attgccattatgatccaggta

SEQ ID NO: 169 - RNA, 19 nt, synthetic construct
  source 1..19: mol_type = other RNA
tggatcataatggcaatgt

SEQ ID NO: 170 - RNA, 21 nt, synthetic construct
  source 1..21: mol_type = other RNA
acattgccattatgatccagg

SEQ ID NO: 171 - RNA, 19 nt, synthetic construct
  source 1..19: mol_type = other RNA
ataatggcaatgtggtcaa

SEQ ID NO: 172 - RNA, 21 nt, synthetic construct
  source 1..21: mol_type = other RNA
ttgaccacattgccattatga

SEQ ID NO: 173 - RNA, 19 nt, synthetic construct
  source 1..19: mol_type = other RNA
atgtggtcaagacggatgt

SEQ ID NO: 174 - RNA, 21 nt, synthetic construct
  source 1..21: mol_type = other RNA
acatccgtcttgaccacattg

SEQ ID NO: 175 - RNA, 19 nt, synthetic construct
  source 1..19: mol_type = other RNA
agacggatgtgccagatat

SEQ ID NO: 176 - RNA, 21 nt, synthetic construct
  source 1..21: mol_type = other RNA
atatctggcacatccgtcttg

SEQ ID NO: 177 - RNA, 19 nt, synthetic construct
  source 1..19: mol_type = other RNA
tttggagtgaagagaccaa

SEQ ID NO: 178 - RNA, 21 nt, synthetic construct
  source 1..21: mol_type = other RNA
ttggtctcttcactccaaagc

SEQ ID NO: 179 - RNA, 19 nt, synthetic construct
  source 1..19: mol_type = other RNA
agtgaagagaccaagatga

SEQ ID NO: 180 - RNA, 21 nt, synthetic construct
  source 1..21: mol_type = other RNA
tcatcttggtctcttcactcc

SEQ ID NO: 181 - RNA, 19 nt, synthetic construct
  source 1..19: mol_type = other RNA
gtgaagagaccaagatgaa

SEQ ID NO: 182 - RNA, 21 nt, synthetic construct
  source 1..21: mol_type = other RNA
ttcatcttggtctcttcactc

SEQ ID NO: 183 - RNA, 19 nt, synthetic construct
  source 1..19: mol_type = other RNA
gaagagaccaagatgaagt

SEQ ID NO: 184 - RNA, 21 nt, synthetic construct
  source 1..21: mol_type = other RNA
acttcatcttggtctcttcac

SEQ ID NO: 185 - RNA, 19 nt, synthetic construct
  source 1..19: mol_type = other RNA
aagagaccaagatgaagtt

SEQ ID NO: 186 - RNA, 21 nt, synthetic construct
  source 1..21: mol_type = other RNA
aacttcatcttggtctcttca

SEQ ID NO: 187 - RNA, 19 nt, synthetic construct
  source 1..19: mol_type = other RNA
agagaccaagatgaagttt

SEQ ID NO: 188 - RNA, 21 nt, synthetic construct
  source 1..21: mol_type = other RNA
aaacttcatcttggtctcttc

SEQ ID NO: 189 - RNA, 19 nt, synthetic construct
  source 1..19: mol_type = other RNA
tgactggaggcatcagatt

SEQ ID NO: 190 - RNA, 21 nt, synthetic construct
  source 1..21: mol_type = other RNA
aatctgatgcctccagtcaca

SEQ ID NO: 191 - RNA, 19 nt, synthetic construct
  source 1..19: mol_type = other RNA
aacaaccacctggcaatat

SEQ ID NO: 192 - RNA, 21 nt, synthetic construct
  source 1..21: mol_type = other RNA
atattgccaggtggttgttgg

SEQ ID NO: 193 - RNA, 19 nt, synthetic construct
  source 1..19: mol_type = other RNA
ccacctggcaatatgactc

SEQ ID NO: 194 - RNA, 21 nt, synthetic construct
  source 1..21: mol_type = other RNA
gagtcatattgccaggtggtt

SEQ ID NO: 195 - RNA, 19 nt, synthetic construct
  source 1..19: mol_type = other RNA
cctggcaatatgactcact

SEQ ID NO: 196 - RNA, 21 nt, synthetic construct
  source 1..21: mol_type = other RNA
agtgagtcatattgccaggtg

SEQ ID NO: 197 - RNA, 19 nt, synthetic construct
  source 1..19: mol_type = other RNA
ctggcaatatgactcactt

SEQ ID NO: 198 - RNA, 21 nt, synthetic construct
  source 1..21: mol_type = other RNA
aagtgagtcatattgccaggt

SEQ ID NO: 199 - RNA, 19 nt, synthetic construct
  source 1..19: mol_type = other RNA
caaatgggcactttcttgt

SEQ ID NO: 200 - RNA, 21 nt, synthetic construct
  source 1..21: mol_type = other RNA
acaagaaagtgcccatttggg

SEQ ID NO: 201 - RNA, 19 nt, synthetic construct
  source 1..19: mol_type = other RNA
aatgggcactttcttgtct

SEQ ID NO: 202 - RNA, 21 nt, synthetic construct
  source 1..21: mol_type = other RNA
agacaagaaagtgcccatttg

SEQ ID NO: 203 - RNA, 19 nt, synthetic construct
  source 1..19: mol_type = other RNA
cactttcttgtctgagact

SEQ ID NO: 204 - RNA, 21 nt, synthetic construct
  source 1..21: mol_type = other RNA
agtctcagacaagaaagtgcc

SEQ ID NO: 205 - RNA, 19 nt, synthetic construct
  source 1..19: mol_type = other RNA
actttcttgtctgagactc

SEQ ID NO: 206 - RNA, 21 nt, synthetic construct
  source 1..21: mol_type = other RNA
gagtctcagacaagaaagtgc

SEQ ID NO: 207 - RNA, 19 nt, synthetic construct
  source 1..19: mol_type = other RNA
ctttcttgtctgagactct

SEQ ID NO: 208 - RNA, 21 nt, synthetic construct
  source 1..21: mol_type = other RNA
agagtctcagacaagaaagtg

SEQ ID NO: 209 - RNA, 19 nt, synthetic construct
  source 1..19: mol_type = other RNA
tgtctgagactctggctta

SEQ ID NO: 210 - RNA, 21 nt, synthetic construct
  source 1..21: mol_type = other RNA
taagccagagtctcagacaag

SEQ ID NO: 211 - RNA, 19 nt, synthetic construct
  source 1..19: mol_type = other RNA
tctgagactctggcttatt

SEQ ID NO: 212 - RNA, 21 nt, synthetic construct
  source 1..21: mol_type = other RNA
aataagccagagtctcagaca

SEQ ID NO: 213 - RNA, 19 nt, synthetic construct
  source 1..19: mol_type = other RNA
ttattccaggttggctgat

SEQ ID NO: 214 - RNA, 21 nt, synthetic construct
  source 1..21: mol_type = other RNA
atcagccaacctggaataagc

SEQ ID NO: 215 - RNA, 19 nt, synthetic construct
  source 1..19: mol_type = other RNA
tgtgttgggagatgggtaa

SEQ ID NO: 216 - RNA, 21 nt, synthetic construct
  source 1..21: mol_type = other RNA
ttacccatctcccaacacatc

SEQ ID NO: 217 - RNA, 19 nt, synthetic construct
  source 1..19: mol_type = other RNA
gtgttgggagatgggtaaa

SEQ ID NO: 218 - RNA, 21 nt, synthetic construct
  source 1..21: mol_type = other RNA
tttacccatctcccaacacat

SEQ ID NO: 219 - RNA, 19 nt, synthetic construct
  source 1..19: mol_type = other RNA
gggagatgggtaaagcgtt

SEQ ID NO: 220 - RNA, 21 nt, synthetic construct
  source 1..21: mol_type = other RNA
aacgctttacccatctcccaa

SEQ ID NO: 221 - RNA, 19 nt, synthetic construct
  source 1..19: mol_type = other RNA
ggagatgggtaaagcgttt

SEQ ID NO: 222 - RNA, 21 nt, synthetic construct
  source 1..21: mol_type = other RNA
aaacgctttacccatctccca

SEQ ID NO: 223 - RNA, 19 nt, synthetic construct
  source 1..19: mol_type = other RNA
gggtaaagcgtttcttcta

SEQ ID NO: 224 - RNA, 21 nt, synthetic construct
  source 1..21: mol_type = other RNA
tagaagaaacgctttacccat

SEQ ID NO: 225 - RNA, 19 nt, synthetic construct
  source 1..19: mol_type = other RNA
ggtaaagcgtttcttctaa

SEQ ID NO: 226 - RNA, 21 nt, synthetic construct
  source 1..21: mol_type = other RNA
ttagaagaaacgctttaccca

SEQ ID NO: 227 - RNA, 19 nt, synthetic construct
  source 1..19: mol_type = other RNA
gtaaagcgtttcttctaaa

SEQ ID NO: 228 - RNA, 21 nt, synthetic construct
  source 1..21: mol_type = other RNA
tttagaagaaacgctttaccc

SEQ ID NO: 229 - RNA, 19 nt, synthetic construct
  source 1..19: mol_type = other RNA
taaagcgtttcttctaaag

SEQ ID NO: 230 - RNA, 21 nt, synthetic construct
  source 1..21: mol_type = other RNA
ctttagaagaaacgctttacc

SEQ ID NO: 231 - RNA, 19 nt, synthetic construct
  source 1..19: mol_type = other RNA
gtttcttctaaaggggtct

SEQ ID NO: 232 - RNA, 21 nt, synthetic construct
  source 1..21: mol_type = other RNA
agacccctttagaagaaacgc

SEQ ID NO: 233 - RNA, 19 nt, synthetic construct
  source 1..19: mol_type = other RNA
tttcttctaaaggggtcta

SEQ ID NO: 234 - RNA, 21 nt, synthetic construct
  source 1..21: mol_type = other RNA
tagacccctttagaagaaacg

SEQ ID NO: 235 - RNA, 19 nt, synthetic construct
  source 1..19: mol_type = other RNA
ggtctacccagaaagcatg

SEQ ID NO: 236 - RNA, 21 nt, synthetic construct
  source 1..21: mol_type = other RNA
catgctttctgggtagacccc

SEQ ID NO: 237 - RNA, 19 nt, synthetic construct
  source 1..19: mol_type = other RNA
tctacccagaaagcatgat

SEQ ID NO: 238 - RNA, 21 nt, synthetic construct
  source 1..21: mol_type = other RNA
atcatgctttctgggtagacc

SEQ ID NO: 239 - RNA, 19 nt, synthetic construct
  source 1..19: mol_type = other RNA
ctacccagaaagcatgatt

SEQ ID NO: 240 - RNA, 21 nt, synthetic construct
  source 1..21: mol_type = other RNA
aatcatgctttctgggtagac

SEQ ID NO: 241 - RNA, 19 nt, synthetic construct
  source 1..19: mol_type = other RNA
tacccagaaagcatgattt

SEQ ID NO: 242 - RNA, 21 nt, synthetic construct
  source 1..21: mol_type = other RNA
aaatcatgctttctgggtaga

SEQ ID NO: 243 - RNA, 19 nt, synthetic construct
  source 1..19: mol_type = other RNA
ccagaaagcatgatttcct

SEQ ID NO: 244 - RNA, 21 nt, synthetic construct
  source 1..21: mol_type = other RNA
aggaaatcatgctttctgggt

SEQ ID NO: 245 - RNA, 19 nt, synthetic construct
  source 1..19: mol_type = other RNA
aagcatgatttcctgccct

SEQ ID NO: 246 - RNA, 21 nt, synthetic construct
  source 1..21: mol_type = other RNA
agggcaggaaatcatgctttc

SEQ ID NO: 247 - RNA, 19 nt, synthetic construct
  source 1..19: mol_type = other RNA
atgatttcctgccctaagt

SEQ ID NO: 248 - RNA, 21 nt, synthetic construct
  source 1..21: mol_type = other RNA
acttagggcaggaaatcatgc

SEQ ID NO: 249 - RNA, 19 nt, synthetic construct
  source 1..19: mol_type = other RNA
ccctaagtcctgtgagaag

SEQ ID NO: 250 - RNA, 21 nt, synthetic construct
  source 1..21: mol_type = other RNA
cttctcacaggacttagggca

SEQ ID NO: 251 - RNA, 19 nt, synthetic construct
  source 1..19: mol_type = other RNA
cctaagtcctgtgagaaga

SEQ ID NO: 252 - RNA, 21 nt, synthetic construct
  source 1..21: mol_type = other RNA
tcttctcacaggacttagggc

SEQ ID NO: 253 - RNA, 19 nt, synthetic construct
  source 1..19: mol_type = other RNA
ctaagtcctgtgagaagat

SEQ ID NO: 254 - RNA, 21 nt, synthetic construct
  source 1..21: mol_type = other RNA
atcttctcacaggacttaggg

SEQ ID NO: 255 - RNA, 19 nt, synthetic construct
  source 1..19: mol_type = other RNA
aagtcctgtgagaagatgt

SEQ ID NO: 256 - RNA, 21 nt, synthetic construct
  source 1..21: mol_type = other RNA
acatcttctcacaggacttag

SEQ ID NO: 257 - RNA, 19 nt, synthetic construct
  source 1..19: mol_type = other RNA
gagggaaggcagagaaaaa

SEQ ID NO: 258 - RNA, 21 nt, synthetic construct
  source 1..21: mol_type = other RNA
tttttctctgccttccctccc

SEQ ID NO: 259 - RNA, 19 nt, synthetic construct
  source 1..19: mol_type = other RNA
agggaaggcagagaaaaat

SEQ ID NO: 260 - RNA, 21 nt, synthetic construct
  source 1..21: mol_type = other RNA
atttttctctgccttccctcc

SEQ ID NO: 261 - RNA, 19 nt, synthetic construct
  source 1..19: mol_type = other RNA
gggaaggcagagaaaaatt

SEQ ID NO: 262 - RNA, 21 nt, synthetic construct
  source 1..21: mol_type = other RNA
aatttttctctgccttccctc

SEQ ID NO: 263 - RNA, 19 nt, synthetic construct
  source 1..19: mol_type = other RNA
ggaaggcagagaaaaatta

SEQ ID NO: 264 - RNA, 21 nt, synthetic construct
  source 1..21: mol_type = other RNA
taatttttctctgccttccct

SEQ ID NO: 265 - RNA, 19 nt, synthetic construct
  source 1..19: mol_type = other RNA
gaaggcagagaaaaattac

SEQ ID NO: 266 - RNA, 21 nt, synthetic construct
  source 1..21: mol_type = other RNA
gtaatttttctctgccttccc

SEQ ID NO: 267 - RNA, 19 nt, synthetic construct
  source 1..19: mol_type = other RNA
aaggcagagaaaaattact

SEQ ID NO: 268 - RNA, 21 nt, synthetic construct
  source 1..21: mol_type = other RNA
agtaatttttctctgccttcc

SEQ ID NO: 269 - RNA, 19 nt, synthetic construct
  source 1..19: mol_type = other RNA
aggcagagaaaaattactt

SEQ ID NO: 270 - RNA, 21 nt, synthetic construct
  source 1..21: mol_type = other RNA
aagtaatttttctctgccttc

SEQ ID NO: 271 - RNA, 19 nt, synthetic construct
  source 1..19: mol_type = other RNA
cctctcccaagatgagaaa

SEQ ID NO: 272 - RNA, 21 nt, synthetic construct
  source 1..21: mol_type = other RNA
tttctcatcttgggagaggct

SEQ ID NO: 273 - RNA, 19 nt, synthetic construct
  source 1..19: mol_type = other RNA
tctcccaagatgagaaagt

SEQ ID NO: 274 - RNA, 21 nt, synthetic construct
  source 1..21: mol_type = other RNA
actttctcatcttgggagagg

SEQ ID NO: 275 - RNA, 19 nt, synthetic construct
  source 1..19: mol_type = other RNA
ggaggaggaagcagataga

SEQ ID NO: 276 - RNA, 21 nt, synthetic construct
  source 1..21: mol_type = other RNA
tctatctgcttcctcctcccc

SEQ ID NO: 277 - RNA, 19 nt, synthetic construct
  source 1..19: mol_type = other RNA
gaggaggaagcagatagat

SEQ ID NO: 278 - RNA, 21 nt, synthetic construct
  source 1..21: mol_type = other RNA
atctatctgcttcctcctccc

SEQ ID NO: 279 - RNA, 19 nt, synthetic construct
  source 1..19: mol_type = other RNA
agggctgttgaggtacctt

SEQ ID NO: 280 - RNA, 21 nt, synthetic construct
  source 1..21: mol_type = other RNA
aaggtacctcaacagccctta

SEQ ID NO: 281 - RNA, 19 nt, synthetic construct
  source 1..19: mol_type = other RNA
ggctgttgaggtaccttaa

SEQ ID NO: 282 - RNA, 21 nt, synthetic construct
  source 1..21: mol_type = other RNA
ttaaggtacctcaacagccct

SEQ ID NO: 283 - RNA, 19 nt, synthetic construct
  source 1..19: mol_type = other RNA
gttgaggtaccttaaggga

SEQ ID NO: 284 - RNA, 21 nt, synthetic construct
  source 1..21: mol_type = other RNA
tcccttaaggtacctcaacag

SEQ ID NO: 285 - RNA, 19 nt, synthetic construct
  source 1..19: mol_type = other RNA
ttgaggtaccttaagggaa

SEQ ID NO: 286 - RNA, 21 nt, synthetic construct
  source 1..21: mol_type = other RNA
ttcccttaaggtacctcaaca

SEQ ID NO: 287 - RNA, 19 nt, synthetic construct
  source 1..19: mol_type = other RNA
gaggtaccttaagggaagg

SEQ ID NO: 288 - RNA, 21 nt, synthetic construct
  source 1..21: mol_type = other RNA
ccttcccttaaggtacctcaa

SEQ ID NO: 289 - RNA, 19 nt, synthetic construct
  source 1..19: mol_type = other RNA
ggaaggtcaagagggagat

SEQ ID NO: 290 - RNA, 21 nt, synthetic construct
  source 1..21: mol_type = other RNA
atctccctcttgaccttccct

SEQ ID NO: 291 - RNA, 19 nt, synthetic construct
  source 1..19: mol_type = other RNA
gaaacaggagtcaggaaaa

SEQ ID NO: 292 - RNA, 21 nt, synthetic construct
  source 1..21: mol_type = other RNA
ttttcctgactcctgtttctg

SEQ ID NO: 293 - RNA, 19 nt, synthetic construct
  source 1..19: mol_type = other RNA
aaacaggagtcaggaaaat

SEQ ID NO: 294 - RNA, 21 nt, synthetic construct
  source 1..21: mol_type = other RNA
attttcctgactcctgtttct

SEQ ID NO: 295 - RNA, 19 nt, synthetic construct
  source 1..19: mol_type = other RNA
aacaggagtcaggaaaatg

SEQ ID NO: 296 - RNA, 21 nt, synthetic construct
  source 1..21: mol_type = other RNA
cattttcctgactcctgtttc

SEQ ID NO: 297 - RNA, 19 nt, synthetic construct
  source 1..19: mol_type = other RNA
gtcaggaaaatgaggcact

SEQ ID NO: 298 - RNA, 21 nt, synthetic construct
  source 1..21: mol_type = other RNA
agtgcctcattttcctgactc

SEQ ID NO: 299 - RNA, 19 nt, synthetic construct
  source 1..19: mol_type = other RNA
gcactaagcctaagaagtt

SEQ ID NO: 300 - RNA, 19 nt, synthetic construct
  source 1..19: mol_type = other RNA
aacttcttaggcttagtgc

SEQ ID NO: 301 - RNA, 19 nt, synthetic construct
  source 1..19: mol_type = other RNA
taagaagttccctggtttt

SEQ ID NO: 302 - RNA, 19 nt, synthetic construct
  source 1..19: mol_type = other RNA
aaaaccagggaacttctta

SEQ ID NO: 303 - RNA, 19 nt, synthetic construct
  source 1..19: mol_type = other RNA
cactgggagacaagcattt

SEQ ID NO: 304 - RNA, 19 nt, synthetic construct
  source 1..19: mol_type = other RNA
aaatgcttgtctcccagtg

SEQ ID NO: 305 - RNA, 19 nt, synthetic construct
  source 1..19: mol_type = other RNA
actgggagacaagcattta

SEQ ID NO: 306 - RNA, 19 nt, synthetic construct
  source 1..19: mol_type = other RNA
taaatgcttgtctcccagt

SEQ ID NO: 307 - RNA, 19 nt, synthetic construct
  source 1..19: mol_type = other RNA
ctgggagacaagcatttat

SEQ ID NO: 308 - RNA, 19 nt, synthetic construct
  source 1..19: mol_type = other RNA
ataaatgcttgtctcccag

SEQ ID NO: 309 - RNA, 19 nt, synthetic construct
  source 1..19: mol_type = other RNA
tgggagacaagcatttata

SEQ ID NO: 310 - RNA, 19 nt, synthetic construct
  source 1..19: mol_type = other RNA
tataaatgcttgtctccca

SEQ ID NO: 311 - RNA, 19 nt, synthetic construct
  source 1..19: mol_type = other RNA
gggagacaagcatttatac

SEQ ID NO: 312 - RNA, 19 nt, synthetic construct
  source 1..19: mol_type = other RNA
gtataaatgcttgtctccc

SEQ ID NO: 313 - RNA, 19 nt, synthetic construct
  source 1..19: mol_type = other RNA
ggagacaagcatttatact

SEQ ID NO: 314 - RNA, 19 nt, synthetic construct
  source 1..19: mol_type = other RNA
agtataaatgcttgtctcc

SEQ ID NO: 315 - RNA, 19 nt, synthetic construct
  source 1..19: mol_type = other RNA
gagacaagcatttatactt

SEQ ID NO: 316 - RNA, 19 nt, synthetic construct
  source 1..19: mol_type = other RNA
aagtataaatgcttgtctc

SEQ ID NO: 317 - RNA, 19 nt, synthetic construct
  source 1..19: mol_type = other RNA
agacaagcatttatacttt

SEQ ID NO: 318 - RNA, 19 nt, synthetic construct
  source 1..19: mol_type = other RNA
aaagtataaatgcttgtct

SEQ ID NO: 319 - RNA, 19 nt, synthetic construct
  source 1..19: mol_type = other RNA
acaagcatttatactttct

SEQ ID NO: 320 - RNA, 19 nt, synthetic construct
  source 1..19: mol_type = other RNA
agaaagtataaatgcttgt

SEQ ID NO: 321 - RNA, 19 nt, synthetic construct
  source 1..19: mol_type = other RNA
caagcatttatactttctt

SEQ ID NO: 322 - RNA, 19 nt, synthetic construct
  source 1..19: mol_type = other RNA
aagaaagtataaatgcttg

SEQ ID NO: 323 - RNA, 19 nt, synthetic construct
  source 1..19: mol_type = other RNA
gcatttatactttctttct

SEQ ID NO: 324 - RNA, 19 nt, synthetic construct
  source 1..19: mol_type = other RNA
agaaagaaagtataaatgc

SEQ ID NO: 325 - RNA, 19 nt, synthetic construct
  source 1..19: mol_type = other RNA
catttatactttctttctt

SEQ ID NO: 326 - RNA, 19 nt, synthetic construct
  source 1..19: mol_type = other RNA
aagaaagaaagtataaatg

SEQ ID NO: 327 - RNA, 19 nt, synthetic construct
  source 1..19: mol_type = other RNA
ggagaaagaaaatcaacaa

SEQ ID NO: 328 - RNA, 19 nt, synthetic construct
  source 1..19: mol_type = other RNA
ttgttgattttctttctcc

SEQ ID NO: 329 - RNA, 19 nt, synthetic construct
  source 1..19: mol_type = other RNA
agaaagaaaatcaacaaat

SEQ ID NO: 330 - RNA, 19 nt, synthetic construct
  source 1..19: mol_type = other RNA
atttgttgattttctttct

SEQ ID NO: 331 - RNA, 19 nt, synthetic construct
  source 1..19: mol_type = other RNA
tcaacaaatgtgagtcata

SEQ ID NO: 332 - RNA, 19 nt, synthetic construct
  source 1..19: mol_type = other RNA
tatgactcacatttgttga

SEQ ID NO: 333 - RNA, 19 nt, synthetic construct
  source 1..19: mol_type = other RNA
caacaaatgtgagtcataa

SEQ ID NO: 334 - RNA, 19 nt, synthetic construct
  source 1..19: mol_type = other RNA
ttatgactcacatttgttg

SEQ ID NO: 335 - RNA, 19 nt, synthetic construct
  source 1..19: mol_type = other RNA
caaatgtgagtcataaaga

SEQ ID NO: 336 - RNA, 19 nt, synthetic construct
  source 1..19: mol_type = other RNA
tctttatgactcacatttg

SEQ ID NO: 337 - RNA, 19 nt, synthetic construct
  source 1..19: mol_type = other RNA
gtgagtcataaagaagggt

SEQ ID NO: 338 - RNA, 19 nt, synthetic construct
  source 1..19: mol_type = other RNA
acccttctttatgactcac

SEQ ID NO: 339 - RNA, 19 nt, synthetic construct
  source 1..19: mol_type = other RNA
tgagtcataaagaagggtt

SEQ ID NO: 340 - RNA, 19 nt, synthetic construct
  source 1..19: mol_type = other RNA
aacccttctttatgactca

SEQ ID NO: 341 - RNA, 19 nt, synthetic construct
  source 1..19: mol_type = other RNA
gagtcataaagaagggtta

SEQ ID NO: 342 - RNA, 19 nt, synthetic construct
  source 1..19: mol_type = other RNA
taacccttctttatgactc

SEQ ID NO: 343 - RNA, 19 nt, synthetic construct
  source 1..19: mol_type = other RNA
cataaagaagggttagggt

SEQ ID NO: 344 - RNA, 19 nt, synthetic construct
  source 1..19: mol_type = other RNA
accctaacccttctttatg

SEQ ID NO: 345 - RNA, 19 nt, synthetic construct
  source 1..19: mol_type = other RNA
atggtccagagcaacagtt

SEQ ID NO: 346 - RNA, 19 nt, synthetic construct
  source 1..19: mol_type = other RNA
aactgttgctctggaccat

SEQ ID NO: 347 - RNA, 19 nt, synthetic construct
  source 1..19: mol_type = other RNA
gtccagagcaacagttctt

SEQ ID NO: 348 - RNA, 19 nt, synthetic construct
  source 1..19: mol_type = other RNA
aagaactgttgctctggac

SEQ ID NO: 349 - RNA, 19 nt, synthetic construct
  source 1..19: mol_type = other RNA
cagagcaacagttcttcaa

SEQ ID NO: 350 - RNA, 19 nt, synthetic construct
  source 1..19: mol_type = other RNA
ttgaagaactgttgctctg

SEQ ID NO: 351 - RNA, 19 nt, synthetic construct
  source 1..19: mol_type = other RNA
gagcaacagttcttcaagt

SEQ ID NO: 352 - RNA, 19 nt, synthetic construct
  source 1..19: mol_type = other RNA
acttgaagaactgttgctc

SEQ ID NO: 353 - RNA, 19 nt, synthetic construct
  source 1..19: mol_type = other RNA
acagttcttcaagtgtact

SEQ ID NO: 354 - RNA, 19 nt, synthetic construct
  source 1..19: mol_type = other RNA
agtacacttgaagaactgt

SEQ ID NO: 355 - RNA, 19 nt, synthetic construct
  source 1..19: mol_type = other RNA
gtgtactctgtaggcttct

SEQ ID NO: 356 - RNA, 19 nt, synthetic construct
  source 1..19: mol_type = other RNA
agaagcctacagagtacac

SEQ ID NO: 357 - RNA, 19 nt, synthetic construct
  source 1..19: mol_type = other RNA
gcttctgggaggtcccttt

SEQ ID NO: 358 - RNA, 19 nt, synthetic construct
  source 1..19: mol_type = other RNA
aaagggacctcccagaagc

SEQ ID NO: 359 - RNA, 19 nt, synthetic construct
  source 1..19: mol_type = other RNA
tcaggggtgtccacaaagt

SEQ ID NO: 360 - RNA, 19 nt, synthetic construct
  source 1..19: mol_type = other RNA
actttgtggacacccctga

SEQ ID NO: 361 - RNA, 19 nt, synthetic construct
  source 1..19: mol_type = other RNA
gggtgtccacaaagtcaaa

SEQ ID NO: 362 - RNA, 19 nt, synthetic construct
  source 1..19: mol_type = other RNA
tttgactttgtggacaccc

SEQ ID NO: 363 - RNA, 19 nt, synthetic construct
  source 1..19: mol_type = other RNA
ggtgtccacaaagtcaaag

SEQ ID NO: 364 - RNA, 19 nt, synthetic construct
  source 1..19: mol_type = other RNA
ctttgactttgtggacacc

SEQ ID NO: 365 - RNA, 19 nt, synthetic construct
  source 1..19: mol_type = other RNA
tgtccacaaagtcaaagct

SEQ ID NO: 366 - RNA, 19 nt, synthetic construct
  source 1..19: mol_type = other RNA
agctttgactttgtggaca

SEQ ID NO: 367 - RNA, 19 nt, synthetic construct
  source 1..19: mol_type = other RNA
tccacaaagtcaaagctat

SEQ ID NO: 368 - RNA, 19 nt, synthetic construct
  source 1..19: mol_type = other RNA
atagctttgactttgtgga

SEQ ID NO: 369 - RNA, 19 nt, synthetic construct
  source 1..19: mol_type = other RNA
ccacaaagtcaaagctatt

SEQ ID NO: 370 - RNA, 19 nt, synthetic construct
  source 1..19: mol_type = other RNA
aatagctttgactttgtgg

SEQ ID NO: 371 - RNA, 19 nt, synthetic construct
  source 1..19: mol_type = other RNA
cacaaagtcaaagctattt

SEQ ID NO: 372 - RNA, 19 nt, synthetic construct
  source 1..19: mol_type = other RNA
aaatagctttgactttgtg

SEQ ID NO: 373 - RNA, 19 nt, synthetic construct
  source 1..19: mol_type = other RNA
acaaagtcaaagctatttt

SEQ ID NO: 374 - RNA, 19 nt, synthetic construct
  source 1..19: mol_type = other RNA
aaaatagctttgactttgt

SEQ ID NO: 375 - RNA, 19 nt, synthetic construct
  source 1..19: mol_type = other RNA
agtcaaagctattttcata

SEQ ID NO: 376 - RNA, 19 nt, synthetic construct
  source 1..19: mol_type = other RNA
tatgaaaatagctttgact

SEQ ID NO: 377 - RNA, 19 nt, synthetic construct
  source 1..19: mol_type = other RNA
gtcaaagctattttcataa

SEQ ID NO: 378 - RNA, 19 nt, synthetic construct
  source 1..19: mol_type = other RNA
ttatgaaaatagctttgac

SEQ ID NO: 379 - RNA, 19 nt, synthetic construct
  source 1..19: mol_type = other RNA
tcaaagctattttcataat

SEQ ID NO: 380 - RNA, 19 nt, synthetic construct
  source 1..19: mol_type = other RNA
attatgaaaatagctttga

SEQ ID NO: 381 - RNA, 19 nt, synthetic construct
  source 1..19: mol_type = other RNA
agctattttcataataata

SEQ ID NO: 382 - RNA, 19 nt, synthetic construct
  source 1..19: mol_type = other RNA
tattattatgaaaatagct

SEQ ID NO: 383 - RNA, 19 nt, synthetic construct
  source 1..19: mol_type = other RNA
gctattttcataataatac

SEQ ID NO: 384 - RNA, 19 nt, synthetic construct
  source 1..19: mol_type = other RNA
gtattattatgaaaatagc

SEQ ID NO: 385 - RNA, 19 nt, synthetic construct
  source 1..19: mol_type = other RNA
ctattttcataataatact

SEQ ID NO: 386 - RNA, 19 nt, synthetic construct
  source 1..19: mol_type = other RNA
agtattattatgaaaatag

SEQ ID NO: 387 - RNA, 19 nt, synthetic construct
  source 1..19: mol_type = other RNA
attttcataataatactaa

SEQ ID NO: 388 - RNA, 19 nt, synthetic construct
  source 1..19: mol_type = other RNA
ttagtattattatgaaaat

SEQ ID NO: 389 - RNA, 19 nt, synthetic construct
  source 1..19: mol_type = other RNA
cataataatactaacatgt

SEQ ID NO: 390 - RNA, 19 nt, synthetic construct
  source 1..19: mol_type = other RNA
acatgttagtattattatg

SEQ ID NO: 391 - RNA, 19 nt, synthetic construct
  source 1..19: mol_type = other RNA
ataataatactaacatgtt

SEQ ID NO: 392 - RNA, 19 nt, synthetic construct
  source 1..19: mol_type = other RNA
aacatgttagtattattat

SEQ ID NO: 393 - RNA, 19 nt, synthetic construct
  source 1..19: mol_type = other RNA
ataatactaacatgttatt

SEQ ID NO: 394 - RNA, 19 nt, synthetic construct
  source 1..19: mol_type = other RNA
aataacatgttagtattat

SEQ ID NO: 395 - RNA, 19 nt, synthetic construct
  source 1..19: mol_type = other RNA
taatactaacatgttattt

SEQ ID NO: 396 - RNA, 19 nt, synthetic construct
  source 1..19: mol_type = other RNA
aaataacatgttagtatta

SEQ ID NO: 397 - RNA, 19 nt, synthetic construct
  source 1..19: mol_type = other RNA
actaacatgttatttgcct

SEQ ID NO: 398 - RNA, 19 nt, synthetic construct
  source 1..19: mol_type = other RNA
aggcaaataacatgttagt

SEQ ID NO: 399 - RNA, 19 nt, synthetic construct
  source 1..19: mol_type = other RNA
taacatgttatttgccttt

SEQ ID NO: 400 - RNA, 19 nt, synthetic construct
  source 1..19: mol_type = other RNA
aaaggcaaataacatgtta

SEQ ID NO: 401 - RNA, 19 nt, synthetic construct
  source 1..19: mol_type = other RNA
catgttatttgccttttga

SEQ ID NO: 402 - RNA, 19 nt, synthetic construct
  source 1..19: mol_type = other RNA
tcaaaaggcaaataacatg

SEQ ID NO: 403 - RNA, 19 nt, synthetic construct
  source 1..19: mol_type = other RNA
tgttatttgccttttgaat

SEQ ID NO: 404 - RNA, 19 nt, synthetic construct
  source 1..19: mol_type = other RNA
attcaaaaggcaaataaca

SEQ ID NO: 405 - RNA, 19 nt, synthetic construct
  source 1..19: mol_type = other RNA
gttatttgccttttgaatt

SEQ ID NO: 406 - RNA, 19 nt, synthetic construct
  source 1..19: mol_type = other RNA
aattcaaaaggcaaataac

SEQ ID NO: 407 - RNA, 19 nt, synthetic construct
  source 1..19: mol_type = other RNA
tgccttttgaattctcatt

SEQ ID NO: 408 - RNA, 19 nt, synthetic construct
  source 1..19: mol_type = other RNA
aatgagaattcaaaaggca

SEQ ID NO: 409 - RNA, 19 nt, synthetic construct
  source 1..19: mol_type = other RNA
gccttttgaattctcatta

SEQ ID NO: 410 - RNA, 19 nt, synthetic construct
  source 1..19: mol_type = other RNA
taatgagaattcaaaaggc

SEQ ID NO: 411 - RNA, 19 nt, synthetic construct
  source 1..19: mol_type = other RNA
ccttttgaattctcattat

SEQ ID NO: 412 - RNA, 19 nt, synthetic construct
  source 1..19: mol_type = other RNA
ataatgagaattcaaaagg

SEQ ID NO: 413 - RNA, 19 nt, synthetic construct
  source 1..19: mol_type = other RNA
tgaattctcattatcttaa

SEQ ID NO: 414 - RNA, 19 nt, synthetic construct
  source 1..19: mol_type = other RNA
ttaagataatgagaattca

SEQ ID NO: 415 - RNA, 19 nt, synthetic construct
  source 1..19: mol_type = other RNA
gaattctcattatcttaaa

SEQ ID NO: 416 - RNA, 19 nt, synthetic construct
  source 1..19: mol_type = other RNA
tttaagataatgagaattc

SEQ ID NO: 417 - RNA, 19 nt, synthetic construct
  source 1..19: mol_type = other RNA
attctcattatcttaaaat

SEQ ID NO: 418 - RNA, 19 nt, synthetic construct
  source 1..19: mol_type = other RNA
attttaagataatgagaat

SEQ ID NO: 419 - RNA, 19 nt, synthetic construct
  source 1..19: mol_type = other RNA
ctcattatcttaaaattgt

SEQ ID NO: 420 - RNA, 19 nt, synthetic construct
  source 1..19: mol_type = other RNA
acaattttaagataatgag

SEQ ID NO: 421 - RNA, 19 nt, synthetic construct
  source 1..19: mol_type = other RNA
cattatcttaaaattgtat

SEQ ID NO: 422 - RNA, 19 nt, synthetic construct
  source 1..19: mol_type = other RNA
atacaattttaagataatg

SEQ ID NO: 423 - RNA, 19 nt, synthetic construct
  source 1..19: mol_type = other RNA
attatcttaaaattgtatt

SEQ ID NO: 424 - RNA, 19 nt, synthetic construct
  source 1..19: mol_type = other RNA
aatacaattttaagataat

SEQ ID NO: 425 - RNA, 19 nt, synthetic construct
  source 1..19: mol_type = other RNA
ggccgtgtgacatgtgatt

SEQ ID NO: 426 - RNA, 19 nt, synthetic construct
  source 1..19: mol_type = other RNA
aatcacatgtcacacggcc

SEQ ID NO: 427 - RNA, 19 nt, synthetic construct
  source 1..19: mol_type = other RNA
gccgtgtgacatgtgatta

SEQ ID NO: 428 - RNA, 19 nt, synthetic construct
  source 1..19: mol_type = other RNA
taatcacatgtcacacggc

SEQ ID NO: 429 - RNA, 19 nt, synthetic construct
  source 1..19: mol_type = other RNA
ccgtgtgacatgtgattac

SEQ ID NO: 430 - RNA, 19 nt, synthetic construct
  source 1..19: mol_type = other RNA
gtaatcacatgtcacacgg

SEQ ID NO: 431 - RNA, 19 nt, synthetic construct
  source 1..19: mol_type = other RNA
cgtgtgacatgtgattaca

SEQ ID NO: 432 - RNA, 19 nt, synthetic construct
  source 1..19: mol_type = other RNA
tgtaatcacatgtcacacg

SEQ ID NO: 433 - RNA, 19 nt, synthetic construct
  source 1..19: mol_type = other RNA
gtgtgacatgtgattacat

SEQ ID NO: 434 - RNA, 19 nt, synthetic construct
  source 1..19: mol_type = other RNA
atgtaatcacatgtcacac

SEQ ID NO: 435 - RNA, 19 nt, synthetic construct
  source 1..19: mol_type = other RNA
tgacatgtgattacatcat

SEQ ID NO: 436 - RNA, 19 nt, synthetic construct
  source 1..19: mol_type = other RNA
atgatgtaatcacatgtca

SEQ ID NO: 437 - RNA, 19 nt, synthetic construct
  source 1..19: mol_type = other RNA
acatgtgattacatcatct

SEQ ID NO: 438 - RNA, 19 nt, synthetic construct
  source 1..19: mol_type = other RNA
agatgatgtaatcacatgt

SEQ ID NO: 439 - RNA, 19 nt, synthetic construct
  source 1..19: mol_type = other RNA
catgtgattacatcatctt

SEQ ID NO: 440 - RNA, 19 nt, synthetic construct
  source 1..19: mol_type = other RNA
aagatgatgtaatcacatg

SEQ ID NO: 441 - RNA, 19 nt, synthetic construct
  source 1..19: mol_type = other RNA
gtgattacatcatctttct

SEQ ID NO: 442 - RNA, 19 nt, synthetic construct
  source 1..19: mol_type = other RNA
agaaagatgatgtaatcac

SEQ ID NO: 443 - RNA, 19 nt, synthetic construct
  source 1..19: mol_type = other RNA
gattacatcatctttctga

SEQ ID NO: 444 - RNA, 19 nt, synthetic construct
  source 1..19: mol_type = other RNA
tcagaaagatgatgtaatc

SEQ ID NO: 445 - RNA, 19 nt, synthetic construct
  source 1..19: mol_type = other RNA
catcatctttctgacatca

SEQ ID NO: 446 - RNA, 19 nt, synthetic construct
  source 1..19: mol_type = other RNA
tgatgtcagaaagatgatg

SEQ ID NO: 447 - RNA, 19 nt, synthetic construct
  source 1..19: mol_type = other RNA
tcatctttctgacatcatt

SEQ ID NO: 448 - RNA, 19 nt, synthetic construct
  source 1..19: mol_type = other RNA
aatgatgtcagaaagatga

SEQ ID NO: 449 - RNA, 19 nt, synthetic construct
  source 1..19: mol_type = other RNA
tctttctgacatcattgtt

SEQ ID NO: 450 - RNA, 19 nt, synthetic construct
  source 1..19: mol_type = other RNA
aacaatgatgtcagaaaga

SEQ ID NO: 451 - RNA, 19 nt, synthetic construct
  source 1..19: mol_type = other RNA
ctttctgacatcattgtta

SEQ ID NO: 452 - RNA, 19 nt, synthetic construct
  source 1..19: mol_type = other RNA
taacaatgatgtcagaaag

SEQ ID NO: 453 - RNA, 19 nt, synthetic construct
  source 1..19: mol_type = other RNA
cattgttaatggaatgtgt

SEQ ID NO: 454 - RNA, 19 nt, synthetic construct
  source 1..19: mol_type = other RNA
acacattccattaacaatg

SEQ ID NO: 455 - RNA, 19 nt, synthetic construct
  source 1..19: mol_type = other RNA
tgttaatggaatgtgtgct

SEQ ID NO: 456 - RNA, 19 nt, synthetic construct
  source 1..19: mol_type = other RNA
agcacacattccattaaca

SEQ ID NO: 457 - RNA, 19 nt, synthetic construct
  source 1..19: mol_type = other RNA
gttaatggaatgtgtgctt

SEQ ID NO: 458 - RNA, 19 nt, synthetic construct
  source 1..19: mol_type = other RNA
aagcacacattccattaac

SEQ ID NO: 459 - RNA, 19 nt, synthetic construct
  source 1..19: mol_type = other RNA
tcatcagctttgctactgt

SEQ ID NO: 460 - RNA, 21 nt, synthetic construct
  source 1..21: mol_type = other RNA
acagtagcaaagctgatgatc

SEQ ID NO: 461 - RNA, 19 nt, synthetic construct
  source 1..19: mol_type = other RNA
tcatcagctttgctactgt

SEQ ID NO: 462 - RNA, 21 nt, synthetic construct
  source 1..21: mol_type = other RNA
acagtagcaaagctgatgatt

SEQ ID NO: 463 - RNA, 19 nt, synthetic construct
  source 1..19: mol_type = other RNA
tcatcagctttgctactgt

SEQ ID NO: 464 - RNA, 21 nt, synthetic construct
  source 1..21: mol_type = other RNA
acagtagcaaagctgatgact

SEQ ID NO: 465 - RNA, 19 nt, synthetic construct
  source 1..19: mol_type = other RNA
ccatcagctttgctactgt

SEQ ID NO: 466 - RNA, 21 nt, synthetic construct
  source 1..21: mol_type = other RNA
acagtagcaaagctgatggtt

SEQ ID NO: 467 - RNA, 19 nt, synthetic construct
  source 1..19: mol_type = other RNA
gcatcagctttgctactgt

SEQ ID NO: 468 - RNA, 21 nt, synthetic construct
  source 1..21: mol_type = other RNA
acagtagcaaagctgatgctt

SEQ ID NO: 469 - RNA, 19 nt, synthetic construct
  source 1..19: mol_type = other RNA
catcagctttgctactgtc

SEQ ID NO: 470 - RNA, 21 nt, synthetic construct
  source 1..21: mol_type = other RNA
gacagtagcaaagctgatgac

SEQ ID NO: 471 - RNA, 19 nt, synthetic construct
  source 1..19: mol_type = other RNA
catcagctttgctactgta

SEQ ID NO: 472 - RNA, 21 nt, synthetic construct
  source 1..21: mol_type = other RNA
tacagtagcaaagctgatgac

SEQ ID NO: 473 - RNA, 19 nt, synthetic construct
  source 1..19: mol_type = other RNA
catcagctttgctactgtc

SEQ ID NO: 474 - RNA, 21 nt, synthetic construct
  source 1..21: mol_type = other RNA
gacagtagcaaagctgatgcc

SEQ ID NO: 475 - RNA, 19 nt, synthetic construct
  source 1..19: mol_type = other RNA
gctgagactctggcttatt

SEQ ID NO: 476 - RNA, 21 nt, synthetic construct
  source 1..21: mol_type = other RNA
aataagccagagtctcagcca

SEQ ID NO: 477 - RNA, 19 nt, synthetic construct
  source 1..19: mol_type = other RNA
cctgagactctggcttatt

SEQ ID NO: 478 - RNA, 21 nt, synthetic construct
  source 1..21: mol_type = other RNA
aataagccagagtctcaggca

SEQ ID NO: 479 - RNA, 19 nt, synthetic construct
  source 1..19: mol_type = other RNA
tctgagactctggcttatt

SEQ ID NO: 480 - RNA, 21 nt, synthetic construct
  source 1..21: mol_type = other RNA
aataagccagagtctcagata

SEQ ID NO: 481 - RNA, 19 nt, synthetic construct
  source 1..19: mol_type = other RNA
tctgagactctggcttatt

SEQ ID NO: 482 - RNA, 21 nt, synthetic construct
  source 1..21: mol_type = other RNA
aataagccagagtctcagatt

SEQ ID NO: 483 - RNA, 19 nt, synthetic construct
  source 1..19: mol_type = other RNA
tctgagactctggcttatt

SEQ ID NO: 484 - RNA, 21 nt, synthetic construct
  source 1..21: mol_type = other RNA
aataagccagagtctcagact

SEQ ID NO: 485 - RNA, 19 nt, synthetic construct
  source 1..19: mol_type = other RNA
gtgaagagaccaagatgaa

SEQ ID NO: 486 - RNA, 21 nt, synthetic construct
  source 1..21: mol_type = other RNA
ttcatcttggtctcttcactt

SEQ ID NO: 487 - RNA, 19 nt, synthetic construct
  source 1..19: mol_type = other RNA
cagagcaacagttcttcaa

SEQ ID NO: 488 - RNA, 21 nt, synthetic construct
  source 1..21: mol_type = other RNA
ttgaagaactgttgctctggt

SEQ ID NO: 489 - RNA, 19 nt, synthetic construct
  source 1..19: mol_type = other RNA
cagagcaacagttcttcaa

SEQ ID NO: 490 - RNA, 21 nt, synthetic construct
  source 1..21: mol_type = other RNA
ttgaagaactgttgctctgtt

SEQ ID NO: 491 - RNA, 19 nt, synthetic construct
  source 1..19: mol_type = other RNA
cagagcaacagttcttcaa

SEQ ID NO: 492 - RNA, 21 nt, synthetic construct
  source 1..21: mol_type = other RNA
ttgaagaactgttgctctgta

SEQ ID NO: 493 - RNA, 19 nt, synthetic construct
  source 1..19: mol_type = other RNA
ggtcaaagctattttcata

SEQ ID NO: 494 - RNA, 21 nt, synthetic construct
  source 1..21: mol_type = other RNA
tatgaaaatagctttgacctt

SEQ ID NO: 495 - RNA, 19 nt, synthetic construct
  source 1..19: mol_type = other RNA
cgtcaaagctattttcata

SEQ ID NO: 496 - RNA, 21 nt, synthetic construct
  source 1..21: mol_type = other RNA
tatgaaaatagctttgacgtt

SEQ ID NO: 497 - RNA, 19 nt, synthetic construct
  source 1..19: mol_type = other RNA
catgtgattacatcatctt

SEQ ID NO: 498 - RNA, 21 nt, synthetic construct
  source 1..21: mol_type = other RNA
aagatgatgtaatcacatgtt

SEQ ID NO: 499 - RNA, 19 nt, synthetic construct
  source 1..19: mol_type = other RNA
  modified_base 1: mod_base = OTHER; note = 2'-O-methyl-cytidine-3'-thiophosphate-phosphate
  modified_base 2: mod_base = OTHER; note = 2'-O-methyl-adenosine-3'-thiophosphate-phosphate
  modified_base 3: mod_base = OTHER; note = 2'-O-methyl-guanosine-3'-phosphate
  modified_base 4: mod_base = OTHER; note = 2'-O-methyl-uridine-3'-phosphate
  modified_base 5: mod_base = OTHER; note = 2'-O-methyl-cytidine-3'-phosphate
  modified_base 6: mod_base = OTHER; note = 2'-O-methyl-guanosine-3'-phosphate
  modified_base 7: mod_base = OTHER; note = 2'-fluoro-uridine-3'-phosphate
  modified_base 8: mod_base = OTHER; note = 2'-fluoro-cytidine-3'-phosphate
  modified_base 9: mod_base = OTHER; note = 2'-fluoro-cytidine-3'-phosphate
  modified_base 10: mod_base = OTHER; note = 2'-O-methyl-cytidine-3'-phosphate
  modified_base 11: mod_base = OTHER; note = 2'-O-methyl-adenosine-3'-phosphate
  modified_base 12: mod_base = OTHER; note = 2'-O-methyl-guanosine-3'-phosphate
  modified_base 13: mod_base = OTHER; note = 2'-O-methyl-adenosine-3'-phosphate
  modified_base 14: mod_base = OTHER; note = 2'-O-methyl-adenosine-3'-phosphate
  modified_base 15: mod_base = OTHER; note = 2'-O-methyl-uridine-3'-phosphate
  modified_base 16: mod_base = OTHER; note = 2'-O-methyl-adenosine-3'-phosphate
  modified_base 17: mod_base = OTHER; note = 2'-O-methyl-adenosine-3'-phosphate
  modified_base 18: mod_base = OTHER; note = 2'-O-methyl-cytidine-3'-phosphate
  modified_base 19: mod_base = OTHER; note = 2'-O-methyl-uridine-3'-phosphate
cagtcgtcccagaataact

SEQ ID NO: 500 - RNA, 21 nt, synthetic construct
  source 1..21: mol_type = other RNA
  modified_base 1: mod_base = OTHER; note = 2'-O-methyl-adenosine-3'-thiophosphate-phosphate
  modified_base 2: mod_base = OTHER; note = 2'-deoxy-guanosine-3'-thiophosphate-phosphate
  modified_base 3: mod_base = OTHER; note = 2'-O-methyl-uridine-3'-phosphate
  modified_base 4: mod_base = OTHER; note = 2'-O-methyl-uridine-3'-phosphate
  modified_base 5: mod_base = OTHER; note = 2'-deoxy-adenosine-3'-phosphate
  modified_base 6: mod_base = OTHER; note = 2'-O-methyl-uridine-3'-phosphate
  modified_base 7: mod_base = OTHER; note = 2'-deoxy-thymine-3'-phosphate
  modified_base 8: mod_base = OTHER; note = 2'-O-methyl-cytidine-3'-phosphate
  modified_base 9: mod_base = OTHER; note = 2'-O-methyl-uridine-3'-phosphate
  modified_base 10: mod_base = OTHER; note = 2'-O-methyl-guanosine-3'-phosphate
  modified_base 11: mod_base = OTHER; note = 2'-O-methyl-guanosine-3'-phosphate
  modified_base 12: mod_base = OTHER; note = 2'-deoxy-guanosine-3'-phosphate
  modified_base 13: mod_base = OTHER; note = 2'-O-methyl-adenosine-3'-phosphate
  modified_base 14: mod_base = OTHER; note = 2'-fluoro-cytidine-3'-phosphate
  modified_base 15: mod_base = OTHER; note = 2'-O-methyl-guanosine-3'-phosphate
  modified_base 16: mod_base = OTHER; note = 2'-O-methyl-adenosine-3'-phosphate
  modified_base 17: mod_base = OTHER; note = 2'-O-methyl-cytidine-3'-phosphate
  modified_base 18: mod_base = OTHER; note = 2'-O-methyl-uridine-3'-phosphate
  modified_base 19: mod_base = OTHER; note = 2'-O-methyl-guanosine-3'-thiophosphate-phosphate
  modified_base 20: mod_base = OTHER; note = 2'-O-methyl-guanosine-3'-thiophosphate-phosphate
  modified_base 21: mod_base = OTHER; note = 2'-O-methyl-uridine-3'-phosphate
agttattctgggacgactggt

SEQ ID NO: 501 - RNA, 19 nt, synthetic construct
  source 1..19: mol_type = other RNA
tcatcagctttgctactgt

SEQ ID NO: 502 - RNA, 21 nt, synthetic construct
  source 1..21: mol_type = other RNA
  modified_base 1: mod_base = OTHER; note = 2'-O-methyl-adenosine-3'-phosphate
  modified_base 2: mod_base = OTHER; note = 2'-fluoro-cytidine-3'-phosphate
  modified_base 3: mod_base = OTHER; note = 2'-O-methyl-adenosine-3'-phosphate
  modified_base 4: mod_base = OTHER; note = 2'-fluoro-guanosine-3'-phosphate
  modified_base 5: mod_base = OTHER; note = 2'-O-methyl-uridine-3'-phosphate
  modified_base 6: mod_base = OTHER; note = 2'-fluoro-adenosine-3'-phosphate
  modified_base 7: mod_base = OTHER; note = 2'-O-methyl-guanosine-3'-phosphate
  modified_base 8: mod_base = OTHER; note = 2'-fluoro-cytidine-3'-phosphate
  modified_base 9: mod_base = OTHER; note = 2'-O-methyl-adenosine-3'-phosphate
  modified_base 10: mod_base = OTHER; note = 2'-O-methyl-adenosine-3'-phosphate
  modified_base 11: mod_base = OTHER; note = 2'-O-methyl-adenosine-3'-phosphate
  modified_base 12: mod_base = OTHER; note = 2'-fluoro-guanosine-3'-phosphate
  modified_base 13: mod_base = OTHER; note = 2'-O-methyl-cytidine-3'-phosphate
  modified_base 14: mod_base = OTHER; note = 2'-fluoro-uridine-3'-phosphate
  modified_base 15: mod_base = OTHER; note = 2'-O-methyl-guanosine-3'-phosphate
  modified_base 16: mod_base = OTHER; note = 2'-fluoro-adenosine-3'-phosphate
  modified_base 17: mod_base = OTHER; note = 2'-O-methyl-uridine-3'-phosphate
  modified_base 18: mod_base = OTHER; note = 2'-fluoro-guanosine-3'-phosphate
  modified_base 19: mod_base = OTHER; note = 2'-O-methyl-adenosine-3'-phosphate
  modified_base 20: mod_base = OTHER; note = 2'-O-methyl-cytidine-3'-phosphate
  modified_base 21: mod_base = OTHER; note = 2'-O-methyl-cytidine-3'-phosphate
acagtagcaaagctgatgacc

SEQ ID NO: 503 - RNA, 19 nt, synthetic construct
  source 1..19: mol_type = other RNA
tcatcagctttgctactgt

SEQ ID NO: 504 - RNA, 21 nt, synthetic construct
  source 1..21: mol_type = other RNA
  modified_base 1: mod_base = OTHER; note = 2'-O-methyl-adenosine-3'-phosphate
  modified_base 2: mod_base = OTHER; note = 2'-fluoro-cytidine-3'-phosphate
  modified_base 3: mod_base = OTHER; note = 2'-O-methyl-adenosine-3'-phosphate
  modified_base 4: mod_base = OTHER; note = 2'-fluoro-guanosine-3'-phosphate
  modified_base 5: mod_base = OTHER; note = 2'-O-methyl-uridine-3'-phosphate
  modified_base 6: mod_base = OTHER; note = 2'-fluoro-adenosine-3'-phosphate
  modified_base 7: mod_base = OTHER; note = 2'-O-methyl-guanosine-3'-phosphate
  modified_base 8: mod_base = OTHER; note = 2'-fluoro-cytidine-3'-phosphate
  modified_base 9: mod_base = OTHER; note = 2'-fluoro-adenosine-3'-phosphate
  modified_base 10: mod_base = OTHER; note = 2'-O-methyl-adenosine-3'-phosphate
  modified_base 11: mod_base = OTHER; note = 2'-O-methyl-adenosine-3'-phosphate
  modified_base 12: mod_base = OTHER; note = 2'-fluoro-guanosine-3'-phosphate
  modified_base 13: mod_base = OTHER; note = 2'-O-methyl-cytidine-3'-phosphate
  modified_base 14: mod_base = OTHER; note = 2'-fluoro-uridine-3'-phosphate
  modified_base 15: mod_base = OTHER; note = 2'-O-methyl-guanosine-3'-phosphate
  modified_base 16: mod_base = OTHER; note = 2'-fluoro-adenosine-3'-phosphate
  modified_base 17: mod_base = OTHER; note = 2'-O-methyl-uridine-3'-phosphate
  modified_base 18: mod_base = OTHER; note = 2'-fluoro-guanosine-3'-phosphate
  modified_base 19: mod_base = OTHER; note = 2'-O-methyl-adenosine-3'-phosphate
  modified_base 20: mod_base = OTHER; note = 2'-O-methyl-cytidine-3'-phosphate
  modified_base 21: mod_base = OTHER; note = 2'-O-methyl-cytidine-3'-phosphate
acagtagcaaagctgatgacc

SEQ ID NO: 505 - RNA, 19 nt, synthetic construct
  source 1..19: mol_type = other RNA
tcatcagctttgctactgt

SEQ ID NO: 506 - RNA, 21 nt, synthetic construct
  source 1..21: mol_type = other RNA
  modified_base 1: mod_base = OTHER; note = 2'-O-methyl-adenosine-3'-phosphate
  modified_base 2: mod_base = OTHER; note = 2'-fluoro-cytidine-3'-phosphate
  modified_base 3: mod_base = OTHER; note = 2'-O-methyl-adenosine-3'-phosphate
  modified_base 4: mod_base = OTHER; note = 2'-fluoro-guanosine-3'-phosphate
  modified_base 5: mod_base = OTHER; note = 2'-O-methyl-uridine-3'-phosphate
  modified_base 6: mod_base = OTHER; note = 2'-fluoro-adenosine-3'-phosphate
  modified_base 7: mod_base = OTHER; note = 2'-O-methyl-guanosine-3'-phosphate
  modified_base 8: mod_base = OTHER; note = 2'-fluoro-cytidine-3'-phosphate
  modified_base 9: mod_base = OTHER; note = 2'-O-methyl-adenosine-3'-phosphate
  modified_base 10: mod_base = OTHER; note = 2'-fluoro-adenosine-3'-phosphate
  modified_base 11: mod_base = OTHER; note = 2'-O-methyl-adenosine-3'-phosphate
  modified_base 12: mod_base = OTHER; note = 2'-fluoro-guanosine-3'-phosphate
  modified_base 13: mod_base = OTHER; note = 2'-O-methyl-cytidine-3'-phosphate
  modified_base 14: mod_base = OTHER; note = 2'-fluoro-uridine-3'-phosphate
  modified_base 15: mod_base = OTHER; note = 2'-O-methyl-guanosine-3'-phosphate
  modified_base 16: mod_base = OTHER; note = 2'-fluoro-adenosine-3'-phosphate
  modified_base 17: mod_base = OTHER; note = 2'-O-methyl-uridine-3'-phosphate
  modified_base 18: mod_base = OTHER; note = 2'-fluoro-guanosine-3'-phosphate
  modified_base 19: mod_base = OTHER; note = 2'-O-methyl-adenosine-3'-phosphate
  modified_base 20: mod_base = OTHER; note = 2'-O-methyl-cytidine-3'-phosphate
  modified_base 21: mod_base = OTHER; note = 2'-O-methyl-cytidine-3'-phosphate
acagtagcaaagctgatgacc

SEQ ID NO: 507 - RNA, 19 nt, synthetic construct
  source 1..19: mol_type = other RNA
tcatcagctttgctactgt

SEQ ID NO: 508 - RNA, 21 nt, synthetic construct
  source 1..21: mol_type = other RNA
  modified_base 1: mod_base = OTHER; note = 2'-O-methyl-adenosine-3'-phosphate
  modified_base 2: mod_base = OTHER; note = 2'-fluoro-cytidine-3'-phosphate
  modified_base 3: mod_base = OTHER; note = 2'-O-methyl-adenosine-3'-phosphate
  modified_base 4: mod_base = OTHER; note = 2'-fluoro-guanosine-3'-phosphate
  modified_base 5: mod_base = OTHER; note = 2'-O-methyl-uridine-3'-phosphate
  modified_base 6: mod_base = OTHER; note = 2'-fluoro-adenosine-3'-phosphate
  modified_base 7: mod_base = OTHER; note = 2'-O-methyl-guanosine-3'-phosphate
  modified_base 8: mod_base = OTHER; note = 2'-fluoro-cytidine-3'-phosphate
  modified_base 9: mod_base = OTHER; note = 2'-O-methyl-adenosine-3'-phosphate
  modified_base 10: mod_base = OTHER; note = 2'-O-methyl-adenosine-3'-phosphate
  modified_base 11: mod_base = OTHER; note = 2'-fluoro-adenosine-3'-phosphate
  modified_base 12: mod_base = OTHER; note = 2'-fluoro-guanosine-3'-phosphate
  modified_base 13: mod_base = OTHER; note = 2'-O-methyl-cytidine-3'-phosphate
  modified_base 14: mod_base = OTHER; note = 2'-fluoro-uridine-3'-phosphate
  modified_base 15: mod_base = OTHER; note = 2'-O-methyl-guanosine-3'-phosphate
  modified_base 16: mod_base = OTHER; note = 2'-fluoro-adenosine-3'-phosphate
  modified_base 17: mod_base = OTHER; note = 2'-O-methyl-uridine-3'-phosphate
  modified_base 18: mod_base = OTHER; note = 2'-fluoro-guanosine-3'-phosphate
  modified_base 19: mod_base = OTHER; note = 2'-O-methyl-adenosine-3'-phosphate
  modified_base 20: mod_base = OTHER; note = 2'-O-methyl-cytidine-3'-phosphate
  modified_base 21: mod_base = OTHER; note = 2'-O-methyl-cytidine-3'-phosphate
acagtagcaaagctgatgacc

SEQ ID NO: 509 - RNA, 19 nt, synthetic construct
  source 1..19: mol_type = other RNA
tcatcagctttgctactgt

SEQ ID NO: 510 - RNA, 21 nt, synthetic construct
  source 1..21: mol_type = other RNA
  modified_base 1: mod_base = OTHER; note = 2'-O-methyl-adenosine-3'-phosphate
  modified_base 2: mod_base = OTHER; note = 2'-O-methyl-cytidine-3'-phosphate
  modified_base 3: mod_base = OTHER; note = 2'-O-methyl-adenosine-3'-phosphate
  modified_base 4: mod_base = OTHER; note = 2'-fluoro-guanosine-3'-phosphate
  modified_base 5: mod_base = OTHER; note = 2'-O-methyl-uridine-3'-phosphate
  modified_base 6: mod_base = OTHER; note = 2'-fluoro-adenosine-3'-phosphate
  modified_base 7: mod_base = OTHER; note = 2'-O-methyl-guanosine-3'-phosphate
  modified_base 8: mod_base = OTHER; note = 2'-fluoro-cytidine-3'-phosphate
  modified_base 9: mod_base = OTHER; note = 2'-O-methyl-adenosine-3'-phosphate
  modified_base 10: mod_base = OTHER; note = 2'-O-methyl-adenosine-3'-phosphate
  modified_base 11: mod_base = OTHER; note = 2'-O-methyl-adenosine-3'-phosphate
  modified_base 12: mod_base = OTHER; note = 2'-fluoro-guanosine-3'-phosphate
  modified_base 13: mod_base = OTHER; note = 2'-O-methyl-cytidine-3'-phosphate
  modified_base 14: mod_base = OTHER; note = 2'-fluoro-uridine-3'-phosphate
  modified_base 15: mod_base = OTHER; note = 2'-O-methyl-guanosine-3'-phosphate
  modified_base 16: mod_base = OTHER; note = 2'-fluoro-adenosine-3'-phosphate
  modified_base 17: mod_base = OTHER; note = 2'-O-methyl-uridine-3'-phosphate
  modified_base 18: mod_base = OTHER; note = 2'-fluoro-guanosine-3'-phosphate
  modified_base 19: mod_base = OTHER; note = 2'-O-methyl-adenosine-3'-phosphate
  modified_base 20: mod_base = OTHER; note = 2'-O-methyl-cytidine-3'-phosphate
  modified_base 21: mod_base = OTHER; note = 2'-O-methyl-cytidine-3'-phosphate
acagtagcaaagctgatgacc

SEQ ID NO: 511 - RNA, 19 nt, synthetic construct
  source 1..19: mol_type = other RNA
tcatcagctttgctactgt

SEQ ID NO: 512 - RNA, 21 nt, synthetic construct
  source 1..21: mol_type = other RNA
  modified_base 1: mod_base = OTHER; note = 2'-O-methyl-adenosine-3'-phosphate
  modified_base 2: mod_base = OTHER; note = 2'-fluoro-cytidine-3'-phosphate
  modified_base 3: mod_base = OTHER; note = 2'-O-methyl-adenosine-3'-phosphate
  modified_base 4: mod_base = OTHER; note = 2'-O-methyl-guanosine-3'-phosphate
  modified_base 5: mod_base = OTHER; note = 2'-O-methyl-uridine-3'-phosphate
  modified_base 6: mod_base = OTHER; note = 2'-fluoro-adenosine-3'-phosphate
  modified_base 7: mod_base = OTHER; note = 2'-O-methyl-guanosine-3'-phosphate
  modified_base 8: mod_base = OTHER; note = 2'-fluoro-cytidine-3'-phosphate
  modified_base 9: mod_base = OTHER; note = 2'-O-methyl-adenosine-3'-phosphate
  modified_base 10: mod_base = OTHER; note = 2'-O-methyl-adenosine-3'-phosphate
  modified_base 11: mod_base = OTHER; note = 2'-O-methyl-adenosine-3'-phosphate
  modified_base 12: mod_base = OTHER; note = 2'-fluoro-guanosine-3'-phosphate
  modified_base 13: mod_base = OTHER; note = 2'-O-methyl-cytidine-3'-phosphate
  modified_base 14: mod_base = OTHER; note = 2'-fluoro-uridine-3'-phosphate
  modified_base 15: mod_base = OTHER; note = 2'-O-methyl-guanosine-3'-phosphate
  modified_base 16: mod_base = OTHER; note = 2'-fluoro-adenosine-3'-phosphate
  modified_base 17: mod_base = OTHER; note = 2'-O-methyl-uridine-3'-phosphate
  modified_base 18: mod_base = OTHER; note = 2'-fluoro-guanosine-3'-phosphate
  modified_base 19: mod_base = OTHER; note = 2'-O-methyl-adenosine-3'-phosphate
  modified_base 20: mod_base = OTHER; note = 2'-O-methyl-cytidine-3'-phosphate
  modified_base 21: mod_base = OTHER; note = 2'-O-methyl-cytidine-3'-phosphate
acagtagcaaagctgatgacc

SEQ ID NO: 513 - RNA, 19 nt, synthetic construct
  source 1..19: mol_type = other RNA
tcatcagctttgctactgt

SEQ ID NO: 514 - RNA, 21 nt, synthetic construct
  source 1..21: mol_type = other RNA
  modified_base 1: mod_base = OTHER; note = 2'-O-methyl-adenosine-3'-phosphate
  modified_base 2: mod_base = OTHER; note = 2'-fluoro-cytidine-3'-phosphate
  modified_base 3: mod_base = OTHER; note = 2'-O-methyl-adenosine-3'-phosphate
  modified_base 4: mod_base = OTHER; note = 2'-fluoro-guanosine-3'-phosphate
  modified_base 5: mod_base = OTHER; note = 2'-O-methyl-uridine-3'-phosphate
  modified_base 6: mod_base = OTHER; note = 2'-O-methyl-adenosine-3'-phosphate
  modified_base 7: mod_base = OTHER; note = 2'-O-methyl-guanosine-3'-phosphate
  modified_base 8: mod_base = OTHER; note = 2'-fluoro-cytidine-3'-phosphate
  modified_base 9: mod_base = OTHER; note = 2'-O-methyl-adenosine-3'-phosphate
  modified_base 10: mod_base = OTHER; note = 2'-O-methyl-adenosine-3'-phosphate
  modified_base 11: mod_base = OTHER; note = 2'-O-methyl-adenosine-3'-phosphate
  modified_base 12: mod_base = OTHER; note = 2'-fluoro-guanosine-3'-phosphate
  modified_base 13: mod_base = OTHER; note = 2'-O-methyl-cytidine-3'-phosphate
  modified_base 14: mod_base = OTHER; note = 2'-fluoro-uridine-3'-phosphate
  modified_base 15: mod_base = OTHER; note = 2'-O-methyl-guanosine-3'-phosphate
  modified_base 16: mod_base = OTHER; note = 2'-fluoro-adenosine-3'-phosphate
  modified_base 17: mod_base = OTHER; note = 2'-O-methyl-uridine-3'-phosphate
  modified_base 18: mod_base = OTHER; note = 2'-fluoro-guanosine-3'-phosphate
  modified_base 19: mod_base = OTHER; note = 2'-O-methyl-adenosine-3'-phosphate
  modified_base 20: mod_base = OTHER; note = 2'-O-methyl-cytidine-3'-phosphate
  modified_base 21: mod_base = OTHER; note = 2'-O-methyl-cytidine-3'-phosphate
acagtagcaaagctgatgacc

SEQ ID NO: 515 - RNA, 19 nt, synthetic construct
  source 1..19: mol_type = other RNA
tcatcagctttgctactgt

SEQ ID NO: 516 - RNA, 21 nt, synthetic construct
  source 1..21: mol_type = other RNA
  modified_base 1: mod_base = OTHER; note = 2'-O-methyl-adenosine-3'-phosphate
  modified_base 2: mod_base = OTHER; note = 2'-fluoro-cytidine-3'-phosphate
  modified_base 3: mod_base = OTHER; note = 2'-O-methyl-adenosine-3'-phosphate
  modified_base 4: mod_base = OTHER; note = 2'-fluoro-guanosine-3'-phosphate
  modified_base 5: mod_base = OTHER; note = 2'-O-methyl-uridine-3'-phosphate
  modified_base 6: mod_base = OTHER; note = 2'-fluoro-adenosine-3'-phosphate
  modified_base 7: mod_base = OTHER; note = 2'-O-methyl-guanosine-3'-phosphate
  modified_base 8: mod_base = OTHER; note = 2'-O-methyl-cytidine-3'-phosphate
  modified_base 9: mod_base = OTHER; note = 2'-O-methyl-adenosine-3'-phosphate
  modified_base 10: mod_base = OTHER; note = 2'-O-methyl-adenosine-3'-phosphate
  modified_base 11: mod_base = OTHER; note = 2'-O-methyl-adenosine-3'-phosphate
  modified_base 12: mod_base = OTHER; note = 2'-fluoro-guanosine-3'-phosphate
  modified_base 13: mod_base = OTHER; note = 2'-O-methyl-cytidine-3'-phosphate
  modified_base 14: mod_base = OTHER; note = 2'-fluoro-uridine-3'-phosphate
  modified_base 15: mod_base = OTHER; note = 2'-O-methyl-guanosine-3'-phosphate
  modified_base 16: mod_base = OTHER; note = 2'-fluoro-adenosine-3'-phosphate
  modified_base 17: mod_base = OTHER; note = 2'-O-methyl-uridine-3'-phosphate
  modified_base 18: mod_base = OTHER; note = 2'-fluoro-guanosine-3'-phosphate
  modified_base 19: mod_base = OTHER; note = 2'-O-methyl-adenosine-3'-phosphate
  modified_base 20: mod_base = OTHER; note = 2'-O-methyl-cytidine-3'-phosphate
  modified_base 21: mod_base = OTHER; note = 2'-O-methyl-cytidine-3'-phosphate
acagtagcaaagctgatgacc

SEQ ID NO: 517 - RNA, 19 nt, synthetic construct
  source 1..19: mol_type = other RNA
tcatcagctttgctactgt

SEQ ID NO: 518 - RNA, 21 nt, synthetic construct
  source 1..21: mol_type = other RNA
  modified_base 1: mod_base = OTHER; note = 2'-O-methyl-adenosine-3'-phosphate
  modified_base 2: mod_base = OTHER; note = 2'-fluoro-cytidine-3'-phosphate
  modified_base 3: mod_base = OTHER; note = 2'-O-methyl-adenosine-3'-phosphate
  modified_base 4: mod_base = OTHER; note = 2'-fluoro-guanosine-3'-phosphate
  modified_base 5: mod_base = OTHER; note = 2'-O-methyl-uridine-3'-phosphate
  modified_base 6: mod_base = OTHER; note = 2'-fluoro-adenosine-3'-phosphate
  modified_base 7: mod_base = OTHER; note = 2'-O-methyl-guanosine-3'-phosphate
  modified_base 8: mod_base = OTHER; note = 2'-fluoro-cytidine-3'-phosphate
  modified_base 9: mod_base = OTHER; note = 2'-O-methyl-adenosine-3'-phosphate
  modified_base 10: mod_base = OTHER; note = 2'-O-methyl-adenosine-3'-phosphate
  modified_base 11: mod_base = OTHER; note = 2'-O-methyl-adenosine-3'-phosphate
  modified_base 12: mod_base = OTHER; note = 2'-O-methyl-guanosine-3'-phosphate
  modified_base 13: mod_base = OTHER; note = 2'-O-methyl-cytidine-3'-phosphate
  modified_base 14: mod_base = OTHER; note = 2'-fluoro-uridine-3'-phosphate
  modified_base 15: mod_base = OTHER; note = 2'-O-methyl-guanosine-3'-phosphate
  modified_base 16: mod_base = OTHER; note = 2'-fluoro-adenosine-3'-phosphate
  modified_base 17: mod_base = OTHER; note = 2'-O-methyl-uridine-3'-phosphate
  modified_base 18: mod_base = OTHER; note = 2'-fluoro-guanosine-3'-phosphate
  modified_base 19: mod_base = OTHER; note = 2'-O-methyl-adenosine-3'-phosphate
  modified_base 20: mod_base = OTHER; note = 2'-O-methyl-cytidine-3'-phosphate
  modified_base 21: mod_base = OTHER; note = 2'-O-methyl-cytidine-3'-phosphate
acagtagcaaagctgatgacc

SEQ ID NO: 519 - RNA, 19 nt, synthetic construct
  source 1..19: mol_type = other RNA
tcatcagctttgctactgt

SEQ ID NO: 520 - RNA, 21 nt, synthetic construct
  source 1..21: mol_type = other RNA
  modified_base 1: mod_base = OTHER; note = 2'-O-methyl-adenosine-3'-phosphate
  modified_base 2: mod_base = OTHER; note = 2'-fluoro-cytidine-3'-phosphate
  modified_base 3: mod_base = OTHER; note = 2'-O-methyl-adenosine-3'-phosphate
  modified_base 4: mod_base = OTHER; note = 2'-fluoro-guanosine-3'-phosphate
  modified_base 5: mod_base = OTHER; note = 2'-O-methyl-uridine-3'-phosphate
  modified_base 6: mod_base = OTHER; note = 2'-fluoro-adenosine-3'-phosphate
  modified_base 7: mod_base = OTHER; note = 2'-O-methyl-guanosine-3'-phosphate
  modified_base 8: mod_base = OTHER; note = 2'-fluoro-cytidine-3'-phosphate
  modified_base 9: mod_base = OTHER; note = 2'-O-methyl-adenosine-3'-phosphate
  modified_base 10: mod_base = OTHER; note = 2'-O-methyl-adenosine-3'-phosphate
  modified_base 11: mod_base = OTHER; note = 2'-O-methyl-adenosine-3'-phosphate
  modified_base 12: mod_base = OTHER; note = 2'-fluoro-guanosine-3'-phosphate
  modified_base 13: mod_base = OTHER; note = 2'-O-methyl-cytidine-3'-phosphate
  modified_base 14: mod_base = OTHER; note = 2'-O-methyl-uridine-3'-phosphate
  modified_base 15: mod_base = OTHER; note = 2'-O-methyl-guanosine-3'-phosphate
  modified_base 16: mod_base = OTHER; note = 2'-fluoro-adenosine-3'-phosphate
  modified_base 17: mod_base = OTHER; note = 2'-O-methyl-uridine-3'-phosphate
  modified_base 18: mod_base = OTHER; note = 2'-fluoro-guanosine-3'-phosphate
  modified_base 19: mod_base = OTHER; note = 2'-O-methyl-adenosine-3'-phosphate
  modified_base 20: mod_base = OTHER; note = 2'-O-methyl-cytidine-3'-phosphate
  modified_base 21: mod_base = OTHER; note = 2'-O-methyl-cytidine-3'-phosphate
acagtagcaaagctgatgacc

SEQ ID NO: 521 - RNA, 19 nt, synthetic construct
  source 1..19: mol_type = other RNA
tcatcagctttgctactgt

SEQ ID NO: 522 - RNA, 21 nt, synthetic construct
  source 1..21: mol_type = other RNA
  modified_base 1: mod_base = OTHER; note = 2'-O-methyl-adenosine-3'-phosphate
  modified_base 2: mod_base = OTHER; note = 2'-fluoro-cytidine-3'-phosphate
  modified_base 3: mod_base = OTHER; note = 2'-O-methyl-adenosine-3'-phosphate
  modified_base 4: mod_base = OTHER; note = 2'-fluoro-guanosine-3'-phosphate
  modified_base 5: mod_base = OTHER; note = 2'-O-methyl-uridine-3'-phosphate
  modified_base 6: mod_base = OTHER; note = 2'-fluoro-adenosine-3'-phosphate
  modified_base 7: mod_base = OTHER; note = 2'-O-methyl-guanosine-3'-phosphate
  modified_base 8: mod_base = OTHER; note = 2'-fluoro-cytidine-3'-phosphate
  modified_base 9: mod_base = OTHER; note = 2'-O-methyl-adenosine-3'-phosphate
  modified_base 10: mod_base = OTHER; note = 2'-O-methyl-adenosine-3'-phosphate
  modified_base 11: mod_base = OTHER; note = 2'-O-methyl-adenosine-3'-phosphate
  modified_base 12: mod_base = OTHER; note = 2'-fluoro-guanosine-3'-phosphate
  modified_base 13: mod_base = OTHER; note = 2'-O-methyl-cytidine-3'-phosphate
  modified_base 14: mod_base = OTHER; note = 2'-fluoro-uridine-3'-phosphate
  modified_base 15: mod_base = OTHER; note = 2'-O-methyl-guanosine-3'-phosphate
  modified_base 16: mod_base = OTHER; note = 2'-O-methyl-adenosine-3'-phosphate
  modified_base 17: mod_base = OTHER; note = 2'-O-methyl-uridine-3'-phosphate
  modified_base 18: mod_base = OTHER; note = 2'-fluoro-guanosine-3'-phosphate
  modified_base 19: mod_base = OTHER; note = 2'-O-methyl-adenosine-3'-phosphate
  modified_base 20: mod_base = OTHER; note = 2'-O-methyl-cytidine-3'-phosphate
  modified_base 21: mod_base = OTHER; note = 2'-O-methyl-cytidine-3'-phosphate
acagtagcaaagctgatgacc

SEQ ID NO: 523 - RNA, 19 nt, synthetic construct
  source 1..19: mol_type = other RNA
tcatcagctttgctactgt

SEQ ID NO: 524 - RNA, 21 nt, synthetic construct
  source 1..21: mol_type = other RNA
  modified_base 1: mod_base = OTHER; note = 2'-O-methyl-adenosine-3'-phosphate
  modified_base 2: mod_base = OTHER; note = 2'-fluoro-cytidine-3'-phosphate
  modified_base 3: mod_base = OTHER; note = 2'-O-methyl-adenosine-3'-phosphate
  modified_base 4: mod_base = OTHER; note = 2'-fluoro-guanosine-3'-phosphate
  modified_base 5: mod_base = OTHER; note = 2'-O-methyl-uridine-3'-phosphate
  modified_base 6: mod_base = OTHER; note = 2'-fluoro-adenosine-3'-phosphate
  modified_base 7: mod_base = OTHER; note = 2'-O-methyl-guanosine-3'-phosphate
  modified_base 8: mod_base = OTHER; note = 2'-fluoro-cytidine-3'-phosphate
  modified_base 9: mod_base = OTHER; note = 2'-O-methyl-adenosine-3'-phosphate
  modified_base 10: mod_base = OTHER; note = 2'-O-methyl-adenosine-3'-phosphate
  modified_base 11: mod_base = OTHER; note = 2'-O-methyl-adenosine-3'-phosphate
  modified_base 12: mod_base = OTHER; note = 2'-fluoro-guanosine-3'-phosphate
  modified_base 13: mod_base = OTHER; note = 2'-O-methyl-cytidine-3'-phosphate
  modified_base 14: mod_base = OTHER; note = 2'-fluoro-uridine-3'-phosphate
  modified_base 15: mod_base = OTHER; note = 2'-O-methyl-guanosine-3'-phosphate
  modified_base 16: mod_base = OTHER; note = 2'-fluoro-adenosine-3'-phosphate
  modified_base 17: mod_base = OTHER; note = 2'-O-methyl-uridine-3'-phosphate
  modified_base 18: mod_base = OTHER; note = 2'-O-methyl-guanosine-3'-phosphate
  modified_base 19: mod_base = OTHER; note = 2'-O-methyl-adenosine-3'-phosphate
  modified_base 20: mod_base = OTHER; note = 2'-O-methyl-cytidine-3'-phosphate
  modified_base 21: mod_base = OTHER; note = 2'-O-methyl-cytidine-3'-phosphate
acagtagcaaagctgatgacc

SEQ ID NO: 525 - RNA, 19 nt, synthetic construct
  source 1..19: mol_type = other RNA
tcatcagctttgctactgt

SEQ ID NO: 526 - RNA, 21 nt, synthetic construct
  source 1..21: mol_type = other RNA
  modified_base 1: mod_base = OTHER; note = 2'-O-methyl-adenosine-3'-thiophosphate-phosphate
  modified_base 2: mod_base = OTHER; note = 2'-fluoro-cytidine-3'-phosphate
  modified_base 3: mod_base = OTHER; note = 2'-O-methyl-adenosine-3'-phosphate
  modified_base 4: mod_base = OTHER; note = 2'-fluoro-guanosine-3'-phosphate
  modified_base 5: mod_base = OTHER; note = 2'-O-methyl-uridine-3'-phosphate
  modified_base 6: mod_base = OTHER; note = 2'-fluoro-adenosine-3'-phosphate
  modified_base 7: mod_base = OTHER; note = 2'-O-methyl-guanosine-3'-phosphate
  modified_base 8: mod_base = OTHER; note = 2'-fluoro-cytidine-3'-phosphate
  modified_base 9: mod_base = OTHER; note = 2'-O-methyl-adenosine-3'-phosphate
  modified_base 10: mod_base = OTHER; note = 2'-O-methyl-adenosine-3'-phosphate
  modified_base 11: mod_base = OTHER; note = 2'-O-methyl-adenosine-3'-phosphate
  modified_base 12: mod_base = OTHER; note = 2'-fluoro-guanosine-3'-phosphate
  modified_base 13: mod_base = OTHER; note = 2'-O-methyl-cytidine-3'-phosphate
  modified_base 14: mod_base = OTHER; note = 2'-fluoro-uridine-3'-phosphate
  modified_base 15: mod_base = OTHER; note = 2'-O-methyl-guanosine-3'-phosphate
  modified_base 16: mod_base = OTHER; note = 2'-fluoro-adenosine-3'-phosphate
  modified_base 17: mod_base = OTHER; note = 2'-O-methyl-uridine-3'-phosphate
  modified_base 18: mod_base = OTHER; note = 2'-fluoro-guanosine-3'-phosphate
  modified_base 19: mod_base = OTHER; note = 2'-O-methyl-adenosine-3'-phosphate
  modified_base 20: mod_base = OTHER; note = 2'-O-methyl-cytidine-3'-thiophosphate-phosphate
  modified_base 21: mod_base = OTHER; note = 2'-O-methyl-cytidine-3'-phosphate
acagtagcaaagctgatgacc

SEQ ID NO: 527 - RNA, 19 nt, synthetic construct
  source 1..19: mol_type = other RNA
tcatcagctttgctactgt

SEQ ID NO: 528 - RNA, 21 nt, synthetic construct
  source 1..21: mol_type = other RNA
  modified_base 1: mod_base = OTHER; note = 2'-O-methyl-adenosine-3'-thiophosphate-phosphate
  modified_base 2: mod_base = OTHER; note = 2'-fluoro-cytidine-3'-thiophosphate-phosphate
  modified_base 3: mod_base = OTHER; note = 2'-O-methyl-adenosine-3'-phosphate
  modified_base 4: mod_base = OTHER; note = 2'-fluoro-guanosine-3'-phosphate
  modified_base 5: mod_base = OTHER; note = 2'-O-methyl-uridine-3'-phosphate
  modified_base 6: mod_base = OTHER; note = 2'-fluoro-adenosine-3'-phosphate
  modified_base 7: mod_base = OTHER; note = 2'-O-methyl-guanosine-3'-phosphate
  modified_base 8: mod_base = OTHER; note = 2'-fluoro-cytidine-3'-phosphate
  modified_base 9: mod_base = OTHER; note = 2'-O-methyl-adenosine-3'-phosphate
  modified_base 10: mod_base = OTHER; note = 2'-O-methyl-adenosine-3'-phosphate
  modified_base 11: mod_base = OTHER; note = 2'-O-methyl-adenosine-3'-phosphate
  modified_base 12: mod_base = OTHER; note = 2'-fluoro-guanosine-3'-phosphate
  modified_base 13: mod_base = OTHER; note = 2'-O-methyl-cytidine-3'-phosphate
  modified_base 14: mod_base = OTHER; note = 2'-fluoro-uridine-3'-phosphate
  modified_base 15: mod_base = OTHER; note = 2'-O-methyl-guanosine-3'-phosphate
  modified_base 16: mod_base = OTHER; note = 2'-fluoro-adenosine-3'-phosphate
  modified_base 17: mod_base = OTHER; note = 2'-O-methyl-uridine-3'-phosphate
  modified_base 18: mod_base = OTHER; note = 2'-fluoro-guanosine-3'-phosphate
  modified_base 19: mod_base = OTHER; note = 2'-O-methyl-adenosine-3'-thiophosphate-phosphate
  modified_base 20: mod_base = OTHER; note = 2'-O-methyl-cytidine-3'-thiophosphate-phosphate
  modified_base 21: mod_base = OTHER; note = 2'-O-methyl-cytidine-3'-phosphate
acagtagcaaagctgatgacc

SEQ ID NO: 529 - RNA, 19 nt, synthetic construct
  source 1..19: mol_type = other RNA
tcatcagctttgctactgt

SEQ ID NO: 530 - RNA, 21 nt, synthetic construct
  source 1..21: mol_type = other RNA
  modified_base 1: mod_base = OTHER; note = 2'-O-methyl-adenosine-3'-phosphate
  modified_base 2: mod_base = OTHER; note = 2'-deoxy-cytidine-3'-phosphate
  modified_base 3: mod_base = OTHER; note = 2'-O-methyl-adenosine-3'-phosphate
  modified_base 4: mod_base = OTHER; note = 2'-fluoro-guanosine-3'-phosphate
  modified_base 5: mod_base = OTHER; note = 2'-deoxy-uridine-3'-phosphate
  modified_base 6: mod_base = OTHER; note = 2'-fluoro-adenosine-3'-phosphate
  modified_base 7: mod_base = OTHER; note = 2'-deoxy-guanosine-3'-phosphate
  modified_base 8: mod_base = OTHER; note = 2'-fluoro-cytidine-3'-phosphate
  modified_base 9: mod_base = OTHER; note = 2'-O-methyl-adenosine-3'-phosphate
  modified_base 10: mod_base = OTHER; note = 2'-O-methyl-adenosine-3'-phosphate
  modified_base 11: mod_base = OTHER; note = 2'-O-methyl-adenosine-3'-phosphate
  modified_base 12: mod_base = OTHER; note = 2'-deoxy-guanosine-3'-phosphate
  modified_base 13: mod_base = OTHER; note = 2'-O-methyl-cytidine-3'-phosphate
  modified_base 14: mod_base = OTHER; note = 2'-fluoro-uridine-3'-phosphate
  modified_base 15: mod_base = OTHER; note = 2'-O-methyl-guanosine-3'-phosphate
  modified_base 16: mod_base = OTHER; note = 2'-fluoro-adenosine-3'-phosphate
  modified_base 17: mod_base = OTHER; note = 2'-O-methyl-uridine-3'-phosphate
  modified_base 18: mod_base = OTHER; note = 2'-fluoro-guanosine-3'-phosphate
  modified_base 19: mod_base = OTHER; note = 2'-O-methyl-adenosine-3'-phosphate
  modified_base 20: mod_base = OTHER; note = 2'-O-methyl-cytidine-3'-phosphate
  modified_base 21: mod_base = OTHER; note = 2'-O-methyl-cytidine-3'-phosphate
acagtagcaaagctgatgacc

SEQ ID NO: 531 - RNA, 19 nt, synthetic construct
  source 1..19: mol_type = other RNA
tcatcagctttgctactgt

SEQ ID NO: 532 - RNA, 21 nt, synthetic construct
  source 1..21: mol_type = other RNA
  modified_base 1: mod_base = OTHER; note = 2'-O-methyl-adenosine-3'-phosphate
  modified_base 2: mod_base = OTHER; note = 2'-fluoro-cytidine-3'-phosphate
  modified_base 3: mod_base = OTHER; note = 2'-O-methyl-adenosine-3'-phosphate
  modified_base 4: mod_base = OTHER; note = 2'-fluoro-hypoxanthine-3'-phosphate
  modified_base 5: mod_base = OTHER; note = 2'-O-methyl-uridine-3'-phosphate
  modified_base 6: mod_base = OTHER; note = 2'-fluoro-adenosine-3'-phosphate
  modified_base 7: mod_base = OTHER; note = 2'-O-methyl-guanosine-3'-phosphate
  modified_base 8: mod_base = OTHER; note = 2'-fluoro-cytidine-3'-phosphate
  modified_base 9: mod_base = OTHER; note = 2'-O-methyl-adenosine-3'-phosphate
  modified_base 10: mod_base = OTHER; note = 2'-O-methyl-adenosine-3'-phosphate
  modified_base 11: mod_base = OTHER; note = 2'-O-methyl-adenosine-3'-phosphate
  modified_base 12: mod_base = OTHER; note = 2'-fluoro-guanosine-3'-phosphate
  modified_base 13: mod_base = OTHER; note = 2'-O-methyl-cytidine-3'-phosphate
  modified_base 14: mod_base = OTHER; note = 2'-fluoro-uridine-3'-phosphate
  modified_base 15: mod_base = OTHER; note = 2'-O-methyl-guanosine-3'-phosphate
  modified_base 16: mod_base = OTHER; note = 2'-fluoro-adenosine-3'-phosphate
  modified_base 17: mod_base = OTHER; note = 2'-O-methyl-uridine-3'-phosphate
  modified_base 18: mod_base = OTHER; note = 2'-fluoro-guanosine-3'-phosphate
  modified_base 19: mod_base = OTHER; note = 2'-O-methyl-adenosine-3'-phosphate
  modified_base 20: mod_base = OTHER; note = 2'-O-methyl-cytidine-3'-phosphate
  modified_base 21: mod_base = OTHER; note = 2'-O-methyl-cytidine-3'-phosphate
acantagcaaagctgatgacc

SEQ ID NO: 533 - RNA, 19 nt, synthetic construct
  source 1..19: mol_type = other RNA
tcatcagctttgctactgt

SEQ ID NO: 534 - RNA, 21 nt, synthetic construct
  source 1..21: mol_type = other RNA
  modified_base 1: mod_base = OTHER; note = 2'-O-methyl-adenosine-3'-phosphate
  modified_base 2: mod_base = OTHER; note = 2'-fluoro-cytidine-3'-phosphate
  modified_base 3: mod_base = OTHER; note = 2'-O-methyl-adenosine-3'-phosphate
  modified_base 4: mod_base = OTHER; note = 2'-fluoro-guanosine-3'-phosphate
  modified_base 5: mod_base = OTHER; note = 2'-O-methyl-uridine-3'-phosphate
  modified_base 6: mod_base = OTHER; note = 2'-fluoro-adenosine-3'-phosphate
  modified_base 7: mod_base = OTHER; note = 2'-O-methyl-hypoxanthine-3'-phosphate
  modified_base 8: mod_base = OTHER; note = 2'-fluoro-cytidine-3'-phosphate
  modified_base 9: mod_base = OTHER; note = 2'-O-methyl-adenosine-3'-phosphate
  modified_base 10: mod_base = OTHER; note = 2'-O-methyl-adenosine-3'-phosphate
  modified_base 11: mod_base = OTHER; note = 2'-O-methyl-adenosine-3'-phosphate
  modified_base 12: mod_base = OTHER; note = 2'-fluoro-guanosine-3'-phosphate
  modified_base 13: mod_base = OTHER; note = 2'-O-methyl-cytidine-3'-phosphate
  modified_base 14: mod_base = OTHER; note = 2'-fluoro-uridine-3'-phosphate
  modified_base 15: mod_base = OTHER; note = 2'-O-methyl-guanosine-3'-phosphate
  modified_base 16: mod_base = OTHER; note = 2'-fluoro-adenosine-3'-phosphate
  modified_base 17: mod_base = OTHER; note = 2'-O-methyl-uridine-3'-phosphate
  modified_base 18: mod_base = OTHER; note = 2'-fluoro-guanosine-3'-phosphate
  modified_base 19: mod_base = OTHER; note = 2'-O-methyl-adenosine-3'-phosphate
  modified_base 20: mod_base = OTHER; note = 2'-O-methyl-cytidine-3'-phosphate
  modified_base 21: mod_base = OTHER; note = 2'-O-methyl-cytidine-3'-phosphate
acagtancaaagctgatgacc

SEQ ID NO: 535 - RNA, 19 nt, synthetic construct
  source 1..19: mol_type = other RNA
  modified_base 1: mod_base = OTHER; note = 2'-O-methyl-uridine-3'-phosphate
  modified_base 2: mod_base = OTHER; note = 2'-O-methyl-cytidine-3'-phosphate
  modified_base 3: mod_base = OTHER; note = 2'-O-methyl-adenosine-3'-phosphate
  modified_base 4: mod_base = OTHER; note = 2'-O-methyl-uridine-3'-phosphate
  modified_base 5: mod_base = OTHER; note = 2'-fluoro-cytidine-3'-phosphate
  modified_base 6: mod_base = OTHER; note = 2'-fluoro-adenosine-3'-phosphate
  modified_base 7: mod_base = OTHER; note = 2'-fluoro-guanosine-3'-phosphate
  modified_base 8: mod_base = OTHER; note = 2'-fluoro-cytidine-3'-phosphate
  modified_base 9: mod_base = OTHER; note = 2'-fluoro-uridine-3'-phosphate
  modified_base 10: mod_base = OTHER; note = 2'-fluoro-uridine-3'-phosphate
  modified_base 11: mod_base = OTHER; note = 2'-O-methyl-uridine-3'-phosphate
  modified_base 12: mod_base = OTHER; note = 2'-O-methyl-guanosine-3'-phosphate
  modified_base 13: mod_base = OTHER; note = 2'-O-methyl-cytidine-3'-phosphate
  modified_base 14: mod_base = OTHER; note = 2'-O-methyl-uridine-3'-phosphate
  modified_base 15: mod_base = OTHER; note = 2'-O-methyl-adenosine-3'-phosphate
  modified_base 16: mod_base = OTHER; note = 2'-O-methyl-cytidine-3'-phosphate
  modified_base 17: mod_base = OTHER; note = 2'-O-methyl-uridine-3'-phosphate
  modified_base 18: mod_base = OTHER; note = 2'-O-methyl-guanosine-3'-phosphate
  modified_base 19: mod_base = OTHER; note = 2'-O-methyl-uridine-3'-phosphate
tcatcagctttgctactgt

SEQ ID NO: 536 - RNA, 21 nt, synthetic construct
  source 1..21: mol_type = other RNA
acagtagcaaagctgatgacc

SEQ ID NO: 537 - RNA, 19 nt, synthetic construct
  source 1..19: mol_type = other RNA
  modified_base 1: mod_base = OTHER; note = 2'-O-methyl-uridine-3'-phosphate
  modified_base 2: mod_base = OTHER; note = 2'-O-methyl-cytidine-3'-phosphate
  modified_base 3: mod_base = OTHER; note = 2'-O-methyl-adenosine-3'-phosphate
  modified_base 4: mod_base = OTHER; note = 2'-O-methyl-uridine-3'-phosphate
  modified_base 5: mod_base = OTHER; note = 2'-O-methyl-cytidine-3'-phosphate
  modified_base 6: mod_base = OTHER; note = 2'-fluoro-adenosine-3'-phosphate
  modified_base 7: mod_base = OTHER; note = 2'-fluoro-guanosine-3'-phosphate
  modified_base 8: mod_base = OTHER; note = 2'-fluoro-cytidine-3'-phosphate
  modified_base 9: mod_base = OTHER; note = 2'-fluoro-uridine-3'-phosphate
  modified_base 10: mod_base = OTHER; note = 2'-fluoro-uridine-3'-phosphate
  modified_base 11: mod_base = OTHER; note = 2'-O-methyl-uridine-3'-phosphate
  modified_base 12: mod_base = OTHER; note = 2'-O-methyl-guanosine-3'-phosphate
  modified_base 13: mod_base = OTHER; note = 2'-O-methyl-cytidine-3'-phosphate
  modified_base 14: mod_base = OTHER; note = 2'-O-methyl-uridine-3'-phosphate
  modified_base 15: mod_base = OTHER; note = 2'-O-methyl-adenosine-3'-phosphate
  modified_base 16: mod_base = OTHER; note = 2'-O-methyl-cytidine-3'-phosphate
  modified_base 17: mod_base = OTHER; note = 2'-O-methyl-uridine-3'-phosphate
  modified_base 18: mod_base = OTHER; note = 2'-O-methyl-guanosine-3'-phosphate
  modified_base 19: mod_base = OTHER; note = 2'-O-methyl-uridine-3'-phosphate
tcatcagctttgctactgt

SEQ ID NO: 538 - RNA, 21 nt, synthetic construct
  source 1..21: mol_type = other RNA
acagtagcaaagctgatgacc

SEQ ID NO: 539 - RNA, 19 nt, synthetic construct
  source 1..19: mol_type = other RNA
  modified_base 1: mod_base = OTHER; note = 2'-O-methyl-uridine-3'-phosphate
  modified_base 2: mod_base = OTHER; note = 2'-O-methyl-cytidine-3'-phosphate
  modified_base 3: mod_base = OTHER; note = 2'-O-methyl-adenosine-3'-phosphate
  modified_base 4: mod_base = OTHER; note = 2'-O-methyl-uridine-3'-phosphate
  modified_base 5: mod_base = OTHER; note = 2'-O-methyl-cytidine-3'-phosphate
  modified_base 6: mod_base = OTHER; note = 2'-O-methyl-adenosine-3'-phosphate
  modified_base 7: mod_base = OTHER; note = 2'-fluoro-guanosine-3'-phosphate
  modified_base 8: mod_base = OTHER; note = 2'-fluoro-cytidine-3'-phosphate
  modified_base 9: mod_base = OTHER; note = 2'-fluoro-uridine-3'-phosphate
  modified_base 10: mod_base = OTHER; note = 2'-fluoro-uridine-3'-phosphate
  modified_base 11: mod_base = OTHER; note = 2'-O-methyl-uridine-3'-phosphate
  modified_base 12: mod_base = OTHER; note = 2'-O-methyl-guanosine-3'-phosphate
  modified_base 13: mod_base = OTHER; note = 2'-O-methyl-cytidine-3'-phosphate
  modified_base 14: mod_base = OTHER; note = 2'-O-methyl-uridine-3'-phosphate
  modified_base 15: mod_base = OTHER; note = 2'-O-methyl-adenosine-3'-phosphate
  modified_base 16: mod_base = OTHER; note = 2'-O-methyl-cytidine-3'-phosphate
  modified_base 17: mod_base = OTHER; note = 2'-O-methyl-uridine-3'-phosphate
  modified_base 18: mod_base = OTHER; note = 2'-O-methyl-guanosine-3'-phosphate
  modified_base 19: mod_base = OTHER; note = 2'-O-methyl-uridine-3'-phosphate
tcatcagctttgctactgt

SEQ ID NO: 540 - RNA, 21 nt, synthetic construct
  source 1..21: mol_type = other RNA
acagtagcaaagctgatgacc

SEQ ID NO: 541 - RNA, 19 nt, synthetic construct
  source 1..19: mol_type = other RNA
  modified_base 1: mod_base = OTHER; note = 2'-O-methyl-uridine-3'-phosphate
  modified_base 2: mod_base = OTHER; note = 2'-O-methyl-cytidine-3'-phosphate
  modified_base 3: mod_base = OTHER; note = 2'-O-methyl-adenosine-3'-phosphate
  modified_base 4: mod_base = OTHER; note = 2'-O-methyl-uridine-3'-phosphate
  modified_base 5: mod_base = OTHER; note = 2'-O-methyl-cytidine-3'-phosphate
  modified_base 6: mod_base = OTHER; note = 2'-O-methyl-adenosine-3'-phosphate
  modified_base 7: mod_base = OTHER; note = 2'-O-methyl-guanosine-3'-phosphate
  modified_base 8: mod_base = OTHER; note = 2'-fluoro-cytidine-3'-phosphate
  modified_base 9: mod_base = OTHER; note = 2'-fluoro-uridine-3'-phosphate
  modified_base 10: mod_base = OTHER; note = 2'-fluoro-uridine-3'-phosphate
  modified_base 11: mod_base = OTHER; note = 2'-O-methyl-uridine-3'-phosphate
  modified_base 12: mod_base = OTHER; note = 2'-O-methyl-guanosine-3'-phosphate
  modified_base 13: mod_base = OTHER; note = 2'-O-methyl-cytidine-3'-phosphate
  modified_base 14: mod_base = OTHER; note = 2'-O-methyl-uridine-3'-phosphate
  modified_base 15: mod_base = OTHER; note = 2'-O-methyl-adenosine-3'-phosphate
  modified_base 16: mod_base = OTHER; note = 2'-O-methyl-cytidine-3'-phosphate
  modified_base 17: mod_base = OTHER; note = 2'-O-methyl-uridine-3'-phosphate
  modified_base 18: mod_base = OTHER; note = 2'-O-methyl-guanosine-3'-phosphate
  modified_base 19: mod_base = OTHER; note = 2'-O-methyl-uridine-3'-phosphate
tcatcagctttgctactgt

SEQ ID NO: 542 - RNA, 21 nt, synthetic construct
  source 1..21: mol_type = other RNA
acagtagcaaagctgatgacc

SEQ ID NO: 543 - RNA, 19 nt, synthetic construct
  source 1..19: mol_type = other RNA
  modified_base 1: mod_base = OTHER; note = 2'-O-methyl-uridine-3'-phosphate
  modified_base 2: mod_base = OTHER; note = 2'-O-methyl-cytidine-3'-phosphate
  modified_base 3: mod_base = OTHER; note = 2'-O-methyl-adenosine-3'-phosphate
  modified_base 4: mod_base = OTHER; note = 2'-O-methyl-uridine-3'-phosphate
  modified_base 5: mod_base = OTHER; note = 2'-fluoro-cytidine-3'-phosphate
  modified_base 6: mod_base = OTHER; note = 2'-O-methyl-adenosine-3'-phosphate
  modified_base 7: mod_base = OTHER; note = 2'-O-methyl-guanosine-3'-phosphate
  modified_base 8: mod_base = OTHER; note = 2'-O-methyl-cytidine-3'-phosphate
  modified_base 9: mod_base = OTHER; note = 2'-fluoro-uridine-3'-phosphate
  modified_base 10: mod_base = OTHER; note = 2'-fluoro-uridine-3'-phosphate
  modified_base 11: mod_base = OTHER; note = 2'-O-methyl-uridine-3'-phosphate
  modified_base 12: mod_base = OTHER; note = 2'-O-methyl-guanosine-3'-phosphate
  modified_base 13: mod_base = OTHER; note = 2'-O-methyl-cytidine-3'-phosphate
  modified_base 14: mod_base = OTHER; note = 2'-O-methyl-uridine-3'-phosphate
  modified_base 15: mod_base = OTHER; note = 2'-O-methyl-adenosine-3'-phosphate
  modified_base 16: mod_base = OTHER; note = 2'-O-methyl-cytidine-3'-phosphate
  modified_base 17: mod_base = OTHER; note = 2'-O-methyl-uridine-3'-phosphate
  modified_base 18: mod_base = OTHER; note = 2'-O-methyl-guanosine-3'-phosphate
  modified_base 19: mod_base = OTHER; note = 2'-O-methyl-uridine-3'-phosphate
tcatcagctttgctactgt

SEQ ID NO: 544 - RNA, 21 nt, synthetic construct
  source 1..21: mol_type = other RNA
acagtagcaaagctgatgacc

SEQ ID NO: 545 - RNA, 19 nt, synthetic construct
  source 1..19: mol_type = other RNA
  modified_base 1: mod_base = OTHER; note = 2'-O-methyl-uridine-3'-phosphate
  modified_base 2: mod_base = OTHER; note = 2'-O-methyl-cytidine-3'-phosphate
  modified_base 3: mod_base = OTHER; note = 2'-O-methyl-adenosine-3'-phosphate
  modified_base 4: mod_base = OTHER; note = 2'-O-methyl-uridine-3'-phosphate
  modified_base 5: mod_base = OTHER; note = 2'-fluoro-cytidine-3'-phosphate
  modified_base 6: mod_base = OTHER; note = 2'-fluoro-adenosine-3'-phosphate
  modified_base 7: mod_base = OTHER; note = 2'-O-methyl-guanosine-3'-phosphate
  modified_base 8: mod_base = OTHER; note = 2'-O-methyl-cytidine-3'-phosphate
  modified_base 9: mod_base = OTHER; note = 2'-O-methyl-uridine-3'-phosphate
  modified_base 10: mod_base = OTHER; note = 2'-fluoro-uridine-3'-phosphate
  modified_base 11: mod_base = OTHER; note = 2'-O-methyl-uridine-3'-phosphate
  modified_base 12: mod_base = OTHER; note = 2'-O-methyl-guanosine-3'-phosphate
  modified_base 13: mod_base = OTHER; note = 2'-O-methyl-cytidine-3'-phosphate
  modified_base 14: mod_base = OTHER; note = 2'-O-methyl-uridine-3'-phosphate
  modified_base 15: mod_base = OTHER; note = 2'-O-methyl-adenosine-3'-phosphate
  modified_base 16: mod_base = OTHER; note = 2'-O-methyl-cytidine-3'-phosphate
  modified_base 17: mod_base = OTHER; note = 2'-O-methyl-uridine-3'-phosphate
  modified_base 18: mod_base = OTHER; note = 2'-O-methyl-guanosine-3'-phosphate
  modified_base 19: mod_base = OTHER; note = 2'-O-methyl-uridine-3'-phosphate
tcatcagctttgctactgt

SEQ ID NO: 546 - RNA, 21 nt, synthetic construct
  source 1..21: mol_type = other RNA
acagtagcaaagctgatgacc

SEQ ID NO: 547 - RNA, 19 nt, synthetic construct
  source 1..19: mol_type = other RNA
  modified_base 1: mod_base = OTHER; note = 2'-O-methyl-uridine-3'-phosphate
  modified_base 2: mod_base = OTHER; note = 2'-O-methyl-cytidine-3'-phosphate
  modified_base 3: mod_base = OTHER; note = 2'-O-methyl-adenosine-3'-phosphate
  modified_base 4: mod_base = OTHER; note = 2'-O-methyl-uridine-3'-phosphate
  modified_base 5: mod_base = OTHER; note = 2'-fluoro-cytidine-3'-phosphate
  modified_base 6: mod_base = OTHER; note = 2'-fluoro-adenosine-3'-phosphate
  modified_base 7: mod_base = OTHER; note = 2'-fluoro-guanosine-3'-phosphate
  modified_base 8: mod_base = OTHER; note = 2'-O-methyl-cytidine-3'-phosphate
  modified_base 9: mod_base = OTHER; note = 2'-O-methyl-uridine-3'-phosphate
  modified_base 10: mod_base = OTHER; note = 2'-O-methyl-uridine-3'-phosphate
  modified_base 11: mod_base = OTHER; note = 2'-O-methyl-uridine-3'-phosphate
  modified_base 12: mod_base = OTHER; note = 2'-O-methyl-guanosine-3'-phosphate
  modified_base 13: mod_base = OTHER; note = 2'-O-methyl-cytidine-3'-phosphate
  modified_base 14: mod_base = OTHER; note = 2'-O-methyl-uridine-3'-phosphate
  modified_base 15: mod_base = OTHER; note = 2'-O-methyl-adenosine-3'-phosphate
  modified_base 16: mod_base = OTHER; note = 2'-O-methyl-cytidine-3'-phosphate
  modified_base 17: mod_base = OTHER; note = 2'-O-methyl-uridine-3'-phosphate
  modified_base 18: mod_base = OTHER; note = 2'-O-methyl-guanosine-3'-phosphate
  modified_base 19: mod_base = OTHER; note = 2'-O-methyl-uridine-3'-phosphate
tcatcagctttgctactgt

SEQ ID NO: 548 - RNA, 21 nt, synthetic construct
  source 1..21: mol_type = other RNA
acagtagcaaagctgatgacc

SEQ ID NO: 549 - RNA, 19 nt, synthetic construct
  source 1..19: mol_type = other RNA
  modified_base 1: mod_base = OTHER; note = 2'-O-methyl-uridine-3'-phosphate
  modified_base 2: mod_base = OTHER; note = 2'-O-methyl-cytidine-3'-phosphate
  modified_base 3: mod_base = OTHER; note = 2'-O-methyl-adenosine-3'-phosphate
  modified_base 4: mod_base = OTHER; note = 2'-O-methyl-uridine-3'-phosphate
  modified_base 5: mod_base = OTHER; note = 2'-fluoro-cytidine-3'-phosphate
  modified_base 6: mod_base = OTHER; note = 2'-fluoro-adenosine-3'-phosphate
  modified_base 7: mod_base = OTHER; note = 2'-fluoro-guanosine-3'-phosphate
  modified_base 8: mod_base = OTHER; note = 2'-fluoro-cytidine-3'-phosphate
  modified_base 9: mod_base = OTHER; note = 2'-O-methyl-uridine-3'-phosphate
  modified_base 10: mod_base = OTHER; note = 2'-O-methyl-uridine-3'-phosphate
  modified_base 11: mod_base = OTHER; note = 2'-O-methyl-uridine-3'-phosphate
  modified_base 12: mod_base = OTHER; note = 2'-O-methyl-guanosine-3'-phosphate
  modified_base 13: mod_base = OTHER; note = 2'-O-methyl-cytidine-3'-phosphate
  modified_base 14: mod_base = OTHER; note = 2'-O-methyl-uridine-3'-phosphate
  modified_base 15: mod_base = OTHER; note = 2'-O-methyl-adenosine-3'-phosphate
  modified_base 16: mod_base = OTHER; note = 2'-O-methyl-cytidine-3'-phosphate
  modified_base 17: mod_base = OTHER; note = 2'-O-methyl-uridine-3'-phosphate
  modified_base 18: mod_base = OTHER; note = 2'-O-methyl-guanosine-3'-phosphate
  modified_base 19: mod_base = OTHER; note = 2'-O-methyl-uridine-3'-phosphate
tcatcagctttgctactgt

SEQ ID NO: 550 - RNA, 21 nt, synthetic construct
  source 1..21: mol_type = other RNA
acagtagcaaagctgatgacc

SEQ ID NO: 551 - RNA, 19 nt, synthetic construct
  source 1..19: mol_type = other RNA
  modified_base 1: mod_base = OTHER; note = 2'-O-methyl-uridine-3'-phosphate
  modified_base 2: mod_base = OTHER; note = 2'-O-methyl-cytidine-3'-phosphate
  modified_base 3: mod_base = OTHER; note = 2'-O-methyl-adenosine-3'-phosphate
  modified_base 4: mod_base = OTHER; note = 2'-O-methyl-uridine-3'-phosphate
  modified_base 5: mod_base = OTHER; note = 2'-fluoro-cytidine-3'-phosphate
  modified_base 6: mod_base = OTHER; note = 2'-fluoro-adenosine-3'-phosphate
  modified_base 7: mod_base = OTHER; note = 2'-fluoro-guanosine-3'-phosphate
  modified_base 8: mod_base = OTHER; note = 2'-fluoro-cytidine-3'-phosphate
  modified_base 9: mod_base = OTHER; note = 2'-fluoro-uridine-3'-phosphate
  modified_base 10: mod_base = OTHER; note = 2'-O-methyl-uridine-3'-phosphate
  modified_base 11: mod_base = OTHER; note = 2'-O-methyl-uridine-3'-phosphate
  modified_base 12: mod_base = OTHER; note = 2'-O-methyl-guanosine-3'-phosphate
  modified_base 13: mod_base = OTHER; note = 2'-O-methyl-cytidine-3'-phosphate
  modified_base 14: mod_base = OTHER; note = 2'-O-methyl-uridine-3'-phosphate
  modified_base 15: mod_base = OTHER; note = 2'-O-methyl-adenosine-3'-phosphate
  modified_base 16: mod_base = OTHER; note = 2'-O-methyl-cytidine-3'-phosphate
  modified_base 17: mod_base = OTHER; note = 2'-O-methyl-uridine-3'-phosphate
  modified_base 18: mod_base = OTHER; note = 2'-O-methyl-guanosine-3'-phosphate
  modified_base 19: mod_base = OTHER; note = 2'-O-methyl-uridine-3'-phosphate
tcatcagctttgctactgt

SEQ ID NO: 552 - RNA, 21 nt, synthetic construct
  source 1..21: mol_type = other RNA
acagtagcaaagctgatgacc

SEQ ID NO: 553 - RNA, 19 nt, synthetic construct
  source 1..19: mol_type = other RNA
  modified_base 1: mod_base = OTHER; note = 2'-O-methyl-uridine-3'-thiophosphate-phosphate
  modified_base 2: mod_base = OTHER; note = 2'-O-methyl-cytidine-3'-phosphate
  modified_base 3: mod_base = OTHER; note = 2'-O-methyl-adenosine-3'-phosphate
  modified_base 4: mod_base = OTHER; note = 2'-O-methyl-uridine-3'-phosphate
  modified_base 5: mod_base = OTHER; note = 2'-fluoro-cytidine-3'-phosphate
  modified_base 6: mod_base = OTHER; note = 2'-fluoro-adenosine-3'-phosphate
  modified_base 7: mod_base = OTHER; note = 2'-fluoro-guanosine-3'-phosphate
  modified_base 8: mod_base = OTHER; note = 2'-fluoro-cytidine-3'-phosphate
  modified_base 9: mod_base = OTHER; note = 2'-fluoro-uridine-3'-phosphate
  modified_base 10: mod_base = OTHER; note = 2'-fluoro-uridine-3'-phosphate
  modified_base 11: mod_base = OTHER; note = 2'-O-methyl-uridine-3'-phosphate
  modified_base 12: mod_base = OTHER; note = 2'-O-methyl-guanosine-3'-phosphate
  modified_base 13: mod_base = OTHER; note = 2'-O-methyl-cytidine-3'-phosphate
  modified_base 14: mod_base = OTHER; note = 2'-O-methyl-uridine-3'-phosphate
  modified_base 15: mod_base = OTHER; note = 2'-O-methyl-adenosine-3'-phosphate
  modified_base 16: mod_base = OTHER; note = 2'-O-methyl-cytidine-3'-phosphate
  modified_base 17: mod_base = OTHER; note = 2'-O-methyl-uridine-3'-phosphate
  modified_base 18: mod_base = OTHER; note = 2'-O-methyl-guanosine-3'-phosphate
  modified_base 19: mod_base = OTHER; note = 2'-O-methyl-uridine-3'-phosphate
tcatcagctttgctactgt

SEQ ID NO: 554 - RNA, 21 nt, synthetic construct
  source 1..21: mol_type = other RNA
acagtagcaaagctgatgacc

SEQ ID NO: 555 - RNA, 19 nt, synthetic construct
  source 1..19: mol_type = other RNA
  modified_base 1: mod_base = OTHER; note = 2'-O-methyl-uridine-3'-thiophosphate-phosphate
  modified_base 2: mod_base = OTHER; note = 2'-O-methyl-cytidine-3'-thiophosphate-phosphate
  modified_base 3: mod_base = OTHER; note = 2'-O-methyl-adenosine-3'-phosphate
  modified_base 4: mod_base = OTHER; note = 2'-O-methyl-uridine-3'-phosphate
  modified_base 5: mod_base = OTHER; note = 2'-fluoro-cytidine-3'-phosphate
  modified_base 6: mod_base = OTHER; note = 2'-fluoro-adenosine-3'-phosphate
  modified_base 7: mod_base = OTHER; note = 2'-fluoro-guanosine-3'-phosphate
  modified_base 8: mod_base = OTHER; note = 2'-fluoro-cytidine-3'-phosphate
  modified_base 9: mod_base = OTHER; note = 2'-fluoro-uridine-3'-phosphate
  modified_base 10: mod_base = OTHER; note = 2'-fluoro-uridine-3'-phosphate
  modified_base 11: mod_base = OTHER; note = 2'-O-methyl-uridine-3'-phosphate
  modified_base 12: mod_base = OTHER; note = 2'-O-methyl-guanosine-3'-phosphate
  modified_base 13: mod_base = OTHER; note = 2'-O-methyl-cytidine-3'-phosphate
  modified_base 14: mod_base = OTHER; note = 2'-O-methyl-uridine-3'-phosphate
  modified_base 15: mod_base = OTHER; note = 2'-O-methyl-adenosine-3'-phosphate
  modified_base 16: mod_base = OTHER; note = 2'-O-methyl-cytidine-3'-phosphate
  modified_base 17: mod_base = OTHER; note = 2'-O-methyl-uridine-3'-phosphate
  modified_base 18: mod_base = OTHER; note = 2'-O-methyl-guanosine-3'-phosphate
  modified_base 19: mod_base = OTHER; note = 2'-O-methyl-uridine-3'-phosphate
tcatcagctttgctactgt

SEQ ID NO: 556 - RNA, 21 nt, synthetic construct
  source 1..21: mol_type = other RNA
acagtagcaaagctgatgacc

SEQ ID NO: 557 - RNA, 19 nt, synthetic construct
  source 1..19: mol_type = other RNA
catcagctttgctactgtc

SEQ ID NO: 558 - RNA, 21 nt, synthetic construct
  source 1..21: mol_type = other RNA
  modified_base 1: mod_base = OTHER; note = 2'-O-methyl-guanosine-3'-phosphate
  modified_base 2: mod_base = OTHER; note = 2'-fluoro-adenosine-3'-phosphate
  modified_base 3: mod_base = OTHER; note = 2'-O-methyl-cytidine-3'-phosphate
  modified_base 4: mod_base = OTHER; note = 2'-fluoro-adenosine-3'-phosphate
  modified_base 5: mod_base = OTHER; note = 2'-O-methyl-guanosine-3'-phosphate
  modified_base 6: mod_base = OTHER; note = 2'-fluoro-uridine-3'-phosphate
  modified_base 7: mod_base = OTHER; note = 2'-O-methyl-adenosine-3'-phosphate
  modified_base 8: mod_base = OTHER; note = 2'-fluoro-guanosine-3'-phosphate
  modified_base 9: mod_base = OTHER; note = 2'-O-methyl-cytidine-3'-phosphate
  modified_base 10: mod_base = OTHER; note = 2'-O-methyl-adenosine-3'-phosphate
  modified_base 11: mod_base = OTHER; note = 2'-O-methyl-adenosine-3'-phosphate
  modified_base 12: mod_base = OTHER; note = 2'-fluoro-adenosine-3'-phosphate
  modified_base 13: mod_base = OTHER; note = 2'-O-methyl-guanosine-3'-phosphate
  modified_base 14: mod_base = OTHER; note = 2'-fluoro-cytidine-3'-phosphate
  modified_base 15: mod_base = OTHER; note = 2'-O-methyl-uridine-3'-phosphate
  modified_base 16: mod_base = OTHER; note = 2'-fluoro-guanosine-3'-phosphate
  modified_base 17: mod_base = OTHER; note = 2'-O-methyl-adenosine-3'-phosphate
  modified_base 18: mod_base = OTHER; note = 2'-fluoro-uridine-3'-phosphate
  modified_base 19: mod_base = OTHER; note = 2'-O-methyl-guanosine-3'-phosphate
  modified_base 20: mod_base = OTHER; note = 2'-O-methyl-adenosine-3'-phosphate
  modified_base 21: mod_base = OTHER; note = 2'-O-methyl-cytidine-3'-phosphate
gacagtagcaaagctgatgac

SEQ ID NO: 559 - RNA, 19 nt, synthetic construct
  source 1..19: mol_type = other RNA
  modified_base 1: mod_base = OTHER; note = 2'-O-methyl-cytidine-3'-phosphate
  modified_base 2: mod_base = OTHER; note = 2'-O-methyl-adenosine-3'-phosphate
  modified_base 3: mod_base = OTHER; note = 2'-O-methyl-uridine-3'-phosphate
  modified_base 4: mod_base = OTHER; note = 2'-O-methyl-cytidine-3'-phosphate
  modified_base 5: mod_base = OTHER; note = 2'-fluoro-adenosine-3'-phosphate
  modified_base 6: mod_base = OTHER; note = 2'-fluoro-guanosine-3'-phosphate
  modified_base 7: mod_base = OTHER; note = 2'-fluoro-cytidine-3'-phosphate
  modified_base 8: mod_base = OTHER; note = 2'-fluoro-uridine-3'-phosphate
  modified_base 9: mod_base = OTHER; note = 2'-fluoro-uridine-3'-phosphate
  modified_base 10: mod_base = OTHER; note = 2'-fluoro-uridine-3'-phosphate
  modified_base 11: mod_base = OTHER; note = 2'-O-methyl-guanosine-3'-phosphate
  modified_base 12: mod_base = OTHER; note = 2'-O-methyl-cytidine-3'-phosphate
  modified_base 13: mod_base = OTHER; note = 2'-O-methyl-uridine-3'-phosphate
  modified_base 14: mod_base = OTHER; note = 2'-O-methyl-adenosine-3'-phosphate
  modified_base 15: mod_base = OTHER; note = 2'-O-methyl-cytidine-3'-phosphate
  modified_base 16: mod_base = OTHER; note = 2'-O-methyl-uridine-3'-phosphate
  modified_base 17: mod_base = OTHER; note = 2'-O-methyl-guanosine-3'-phosphate
  modified_base 18: mod_base = OTHER; note = 2'-O-methyl-uridine-3'-phosphate
  modified_base 19: mod_base = OTHER; note = 2'-O-methyl-cytidine-3'-phosphate
catcagctttgctactgtc

SEQ ID NO: 560 - RNA, 21 nt, synthetic construct
  source 1..21: mol_type = other RNA
gacagtagcaaagctgatgac

SEQ ID NO: 561 - RNA, 19 nt, synthetic construct
  source 1..19: mol_type = other RNA
  modified_base 1: mod_base = OTHER; note = 2'-O-methyl-uridine-3'-phosphate
  modified_base 2: mod_base = OTHER; note = 2'-O-methyl-cytidine-3'-phosphate
  modified_base 3: mod_base = OTHER; note = 2'-O-methyl-adenosine-3'-phosphate
  modified_base 4: mod_base = OTHER; note = 2'-O-methyl-uridine-3'-phosphate
  modified_base 5: mod_base = OTHER; note = 2'-fluoro-cytidine-3'-phosphate
  modified_base 6: mod_base = OTHER; note = 2'-fluoro-adenosine-3'-phosphate
  modified_base 7: mod_base = OTHER; note = 2'-fluoro-guanosine-3'-phosphate
  modified_base 8: mod_base = OTHER; note = 2'-fluoro-cytidine-3'-phosphate
  modified_base 9: mod_base = OTHER; note = 2'-fluoro-uridine-3'-phosphate
  modified_base 10: mod_base = OTHER; note = 2'-fluoro-uridine-3'-phosphate
  modified_base 11: mod_base = OTHER; note = 2'-O-methyl-uridine-3'-phosphate
  modified_base 12: mod_base = OTHER; note = 2'-O-methyl-guanosine-3'-phosphate
  modified_base 13: mod_base = OTHER; note = 2'-O-methyl-cytidine-3'-phosphate
  modified_base 14: mod_base = OTHER; note = 2'-O-methyl-uridine-3'-phosphate
  modified_base 15: mod_base = OTHER; note = 2'-O-methyl-adenosine-3'-phosphate
  modified_base 16: mod_base = OTHER; note = 2'-O-methyl-cytidine-3'-phosphate
  modified_base 17: mod_base = OTHER; note = 2'-O-methyl-uridine-3'-phosphate
  modified_base 18: mod_base = OTHER; note = 2'-O-methyl-guanosine-3'-phosphate
  modified_base 19: mod_base = OTHER; note = inverted 2'-uridine-3'-phosphate
tcatcagctttgctactgt

SEQ ID NO: 562 - RNA, 21 nt, synthetic construct
  source 1..21: mol_type = other RNA
acagtagcaaagctgatgacc

SEQ ID NO: 563 - RNA, 19 nt, synthetic construct
  source 1..19: mol_type = other RNA
  modified_base 1: mod_base = OTHER; note = 2'-O-methyl-cytidine-3'-phosphate
  modified_base 2: mod_base = OTHER; note = 2'-O-methyl-adenosine-3'-phosphate
  modified_base 3: mod_base = OTHER; note = 2'-O-methyl-uridine-3'-phosphate
  modified_base 4: mod_base = OTHER; note = 2'-O-methyl-cytidine-3'-phosphate
  modified_base 5: mod_base = OTHER; note = 2'-fluoro-adenosine-3'-phosphate
  modified_base 6: mod_base = OTHER; note = 2'-fluoro-guanosine-3'-phosphate
  modified_base 7: mod_base = OTHER; note = 2'-fluoro-cytidine-3'-phosphate
  modified_base 8: mod_base = OTHER; note = 2'-fluoro-uridine-3'-phosphate
  modified_base 9: mod_base = OTHER; note = 2'-fluoro-uridine-3'-phosphate
  modified_base 10: mod_base = OTHER; note = 2'-fluoro-uridine-3'-phosphate
  modified_base 11: mod_base = OTHER; note = 2'-O-methyl-guanosine-3'-phosphate
  modified_base 12: mod_base = OTHER; note = 2'-O-methyl-cytidine-3'-phosphate
  modified_base 13: mod_base = OTHER; note = 2'-O-methyl-uridine-3'-phosphate
  modified_base 14: mod_base = OTHER; note = 2'-O-methyl-adenosine-3'-phosphate
  modified_base 15: mod_base = OTHER; note = 2'-O-methyl-cytidine-3'-phosphate
  modified_base 16: mod_base = OTHER; note = 2'-O-methyl-uridine-3'-phosphate
  modified_base 17: mod_base = OTHER; note = 2'-O-methyl-guanosine-3'-phosphate
  modified_base 18: mod_base = OTHER; note = 2'-O-methyl-uridine-3'-phosphate
  modified_base 19: mod_base = OTHER; note = inverted 2'-cytidine-3'-phosphate
catcagctttgctactgtc

SEQ ID NO: 564 - RNA, 21 nt, synthetic construct
  source 1..21: mol_type = other RNA
gacagtagcaaagctgatgac

SEQ ID NO: 565 - RNA, 19 nt, synthetic construct
  source 1..19: mol_type = other RNA
  modified_base 1: mod_base = OTHER; note = 2'-O-methyl-uridine-3'-thiophosphate-phosphate
  modified_base 2: mod_base = OTHER; note = 2'-O-methyl-cytidine-3'-thiophosphate-phosphate
  modified_base 3: mod_base = OTHER; note = 2'-O-methyl-adenosine-3'-phosphate
  modified_base 4: mod_base = OTHER; note = 2'-O-methyl-uridine-3'-phosphate
  modified_base 5: mod_base = OTHER; note = 2'-fluoro-cytidine-3'-phosphate
  modified_base 6: mod_base = OTHER; note = 2'-fluoro-adenosine-3'-phosphate
  modified_base 7: mod_base = OTHER; note = 2'-fluoro-guanosine-3'-phosphate
  modified_base 8: mod_base = OTHER; note = 2'-fluoro-cytidine-3'-phosphate
  modified_base 9: mod_base = OTHER; note = 2'-fluoro-uridine-3'-phosphate
  modified_base 10: mod_base = OTHER; note = 2'-fluoro-uridine-3'-phosphate
  modified_base 11: mod_base = OTHER; note = 2'-O-methyl-uridine-3'-phosphate
  modified_base 12: mod_base = OTHER; note = 2'-O-methyl-guanosine-3'-phosphate
  modified_base 13: mod_base = OTHER; note = 2'-O-methyl-cytidine-3'-phosphate
  modified_base 14: mod_base = OTHER; note = 2'-O-methyl-uridine-3'-phosphate
  modified_base 15: mod_base = OTHER; note = 2'-O-methyl-adenosine-3'-phosphate
  modified_base 16: mod_base = OTHER; note = 2'-O-methyl-cytidine-3'-phosphate
  modified_base 17: mod_base = OTHER; note = 2'-O-methyl-uridine-3'-phosphate
  modified_base 18: mod_base = OTHER; note = 2'-O-methyl-guanosine-3'-phosphate
  modified_base 19: mod_base = OTHER; note = 2'-O-methyl-uridine-3'-phosphate
tcatcagctttgctactgt

SEQ ID NO: 566 - RNA, 21 nt, synthetic construct
  source 1..21: mol_type = other RNA
  modified_base 1: mod_base = OTHER; note = 2'-O-methyl-adenosine-3'-thiophosphate-phosphate
  modified_base 2: mod_base = OTHER; note = 2'-fluoro-cytidine-3'-thiophosphate-phosphate
  modified_base 3: mod_base = OTHER; note = 2'-O-methyl-adenosine-3'-phosphate
  modified_base 4: mod_base = OTHER; note = 2'-fluoro-guanosine-3'-phosphate
  modified_base 5: mod_base = OTHER; note = 2'-O-methyl-uridine-3'-phosphate
  modified_base 6: mod_base = OTHER; note = 2'-fluoro-adenosine-3'-phosphate
  modified_base 7: mod_base = OTHER; note = 2'-O-methyl-guanosine-3'-phosphate
  modified_base 8: mod_base = OTHER; note = 2'-fluoro-cytidine-3'-phosphate
  modified_base 9: mod_base = OTHER; note = 2'-O-methyl-adenosine-3'-phosphate
  modified_base 10: mod_base = OTHER; note = 2'-O-methyl-adenosine-3'-phosphate
  modified_base 11: mod_base = OTHER; note = 2'-O-methyl-adenosine-3'-phosphate
  modified_base 12: mod_base = OTHER; note = 2'-fluoro-guanosine-3'-phosphate
  modified_base 13: mod_base = OTHER; note = 2'-O-methyl-cytidine-3'-phosphate
  modified_base 14: mod_base = OTHER; note = 2'-fluoro-uridine-3'-phosphate
  modified_base 15: mod_base = OTHER; note = 2'-O-methyl-guanosine-3'-phosphate
  modified_base 16: mod_base = OTHER; note = 2'-fluoro-adenosine-3'-phosphate
  modified_base 17: mod_base = OTHER; note = 2'-O-methyl-uridine-3'-phosphate
  modified_base 18: mod_base = OTHER; note = 2'-fluoro-guanosine-3'-phosphate
  modified_base 19: mod_base = OTHER; note = 2'-O-methyl-adenosine-3'-thiophosphate-phosphate
  modified_base 20: mod_base = OTHER; note = 2'-O-methyl-cytidine-3'-thiophosphate-phosphate
  modified_base 21: mod_base = OTHER; note = 2'-O-methyl-cytidine-3'-phosphate
acagtagcaaagctgatgacc

SEQ ID NO: 567 - RNA, 19 nt, synthetic construct
  source 1..19: mol_type = other RNA
  modified_base 1: mod_base = OTHER; note = inverted 2'-deoxy-thymine-3'-phosphate
  modified_base 2: mod_base = OTHER; note = 2'-O-methyl-cytidine-3'-phosphate
  modified_base 3: mod_base = OTHER; note = 2'-O-methyl-adenosine-3'-phosphate
  modified_base 4: mod_base = OTHER; note = 2'-O-methyl-uridine-3'-phosphate
  modified_base 5: mod_base = OTHER; note = 2'-fluoro-cytidine-3'-phosphate
  modified_base 6: mod_base = OTHER; note = 2'-fluoro-adenosine-3'-phosphate
  modified_base 7: mod_base = OTHER; note = 2'-fluoro-guanosine-3'-phosphate
  modified_base 8: mod_base = OTHER; note = 2'-fluoro-cytidine-3'-phosphate
  modified_base 9: mod_base = OTHER; note = 2'-fluoro-uridine-3'-phosphate
  modified_base 10: mod_base = OTHER; note = 2'-fluoro-uridine-3'-phosphate
  modified_base 11: mod_base = OTHER; note = 2'-O-methyl-uridine-3'-phosphate
  modified_base 12: mod_base = OTHER; note = 2'-O-methyl-guanosine-3'-phosphate
  modified_base 13: mod_base = OTHER; note = 2'-O-methyl-cytidine-3'-phosphate
  modified_base 14: mod_base = OTHER; note = 2'-O-methyl-uridine-3'-phosphate
  modified_base 15: mod_base = OTHER; note = 2'-O-methyl-adenosine-3'-phosphate
  modified_base 16: mod_base = OTHER; note = 2'-O-methyl-cytidine-3'-phosphate
  modified_base 17: mod_base = OTHER; note = 2'-O-methyl-uridine-3'-phosphate
  modified_base 18: mod_base = OTHER; note = 2'-O-methyl-guanosine-3'-phosphate
  modified_base 19: mod_base = OTHER; note = 2'-O-methyl-uridine-3'-phosphate
tcatcagctttgctactgt

SEQ ID NO: 568 - RNA, 21 nt, synthetic construct
  source 1..21: mol_type = other RNA
acagtagcaaagctgatgacc

SEQ ID NO: 569 - RNA, 19 nt, synthetic construct
  source 1..19: mol_type = other RNA
tctgagactctggcttatt

SEQ ID NO: 570 - RNA, 21 nt, synthetic construct
  source 1..21: mol_type = other RNA
  modified_base 1: mod_base = OTHER; note = 2'-O-methyl-adenosine-3'-phosphate
  modified_base 2: mod_base = OTHER; note = 2'-fluoro-adenosine-3'-phosphate
  modified_base 3: mod_base = OTHER; note = 2'-O-methyl-uridine-3'-phosphate
  modified_base 4: mod_base = OTHER; note = 2'-fluoro-adenosine-3'-phosphate
  modified_base 5: mod_base = OTHER; note = 2'-O-methyl-adenosine-3'-phosphate
  modified_base 6: mod_base = OTHER; note = 2'-fluoro-guanosine-3'-phosphate
  modified_base 7: mod_base = OTHER; note = 2'-O-methyl-cytidine-3'-phosphate
  modified_base 8: mod_base = OTHER; note = 2'-fluoro-cytidine-3'-phosphate
  modified_base 9: mod_base = OTHER; note = 2'-O-methyl-adenosine-3'-phosphate
  modified_base 10: mod_base = OTHER; note = 2'-O-methyl-guanosine-3'-phosphate
  modified_base 11: mod_base = OTHER; note = 2'-O-methyl-adenosine-3'-phosphate
  modified_base 12: mod_base = OTHER; note = 2'-fluoro-guanosine-3'-phosphate
  modified_base 13: mod_base = OTHER; note = 2'-O-methyl-uridine-3'-phosphate
  modified_base 14: mod_base = OTHER; note = 2'-fluoro-cytidine-3'-phosphate
  modified_base 15: mod_base = OTHER; note = 2'-O-methyl-uridine-3'-phosphate
  modified_base 16: mod_base = OTHER; note = 2'-fluoro-cytidine-3'-phosphate
  modified_base 17: mod_base = OTHER; note = 2'-O-methyl-adenosine-3'-phosphate
  modified_base 18: mod_base = OTHER; note = 2'-fluoro-guanosine-3'-phosphate
  modified_base 19: mod_base = OTHER; note = 2'-O-methyl-adenosine-3'-phosphate
  modified_base 20: mod_base = OTHER; note = 2'-O-methyl-cytidine-3'-phosphate
  modified_base 21: mod_base = OTHER; note = 2'-O-methyl-adenosine-3'-phosphate
aataagccagagtctcagaca

SEQ ID NO: 571 - RNA, 19 nt, synthetic construct
  source 1..19: mol_type = other RNA
tctgagactctggcttatt

SEQ ID NO: 572 - RNA, 21 nt, synthetic construct
  source 1..21: mol_type = other RNA
  modified_base 1: mod_base = OTHER; note = 2'-O-methyl-adenosine-3'-phosphate
  modified_base 2: mod_base = OTHER; note = 2'-fluoro-adenosine-3'-phosphate
  modified_base 3: mod_base = OTHER; note = 2'-O-methyl-uridine-3'-phosphate
  modified_base 4: mod_base = OTHER; note = 2'-fluoro-adenosine-3'-phosphate
  modified_base 5: mod_base = OTHER; note = 2'-O-methyl-adenosine-3'-phosphate
  modified_base 6: mod_base = OTHER; note = 2'-fluoro-guanosine-3'-phosphate
  modified_base 7: mod_base = OTHER; note = 2'-O-methyl-cytidine-3'-phosphate
  modified_base 8: mod_base = OTHER; note = 2'-fluoro-cytidine-3'-phosphate
  modified_base 9: mod_base = OTHER; note = 2'-fluoro-adenosine-3'-phosphate
  modified_base 10: mod_base = OTHER; note = 2'-O-methyl-guanosine-3'-phosphate
  modified_base 11: mod_base = OTHER; note = 2'-O-methyl-adenosine-3'-phosphate
  modified_base 12: mod_base = OTHER; note = 2'-fluoro-guanosine-3'-phosphate
  modified_base 13: mod_base = OTHER; note = 2'-O-methyl-uridine-3'-phosphate
  modified_base 14: mod_base = OTHER; note = 2'-fluoro-cytidine-3'-phosphate
  modified_base 15: mod_base = OTHER; note = 2'-O-methyl-uridine-3'-phosphate
  modified_base 16: mod_base = OTHER; note = 2'-fluoro-cytidine-3'-phosphate
  modified_base 17: mod_base = OTHER; note = 2'-O-methyl-adenosine-3'-phosphate
  modified_base 18: mod_base = OTHER; note = 2'-fluoro-guanosine-3'-phosphate
  modified_base 19: mod_base = OTHER; note = 2'-O-methyl-adenosine-3'-phosphate
  modified_base 20: mod_base = OTHER; note = 2'-O-methyl-cytidine-3'-phosphate
  modified_base 21: mod_base = OTHER; note = 2'-O-methyl-adenosine-3'-phosphate
aataagccagagtctcagaca

SEQ ID NO: 573 - RNA, 19 nt, synthetic construct
  source 1..19: mol_type = other RNA
tctgagactctggcttatt

SEQ ID NO: 574 - RNA, 21 nt, synthetic construct
  source 1..21: mol_type = other RNA
  modified_base 1: mod_base = OTHER; note = 2'-O-methyl-adenosine-3'-phosphate
  modified_base 2: mod_base = OTHER; note = 2'-fluoro-adenosine-3'-phosphate
  modified_base 3: mod_base = OTHER; note = 2'-O-methyl-uridine-3'-phosphate
  modified_base 4: mod_base = OTHER; note = 2'-fluoro-adenosine-3'-phosphate
  modified_base 5: mod_base = OTHER; note = 2'-O-methyl-adenosine-3'-phosphate
  modified_base 6: mod_base = OTHER; note = 2'-fluoro-guanosine-3'-phosphate
  modified_base 7: mod_base = OTHER; note = 2'-O-methyl-cytidine-3'-phosphate
  modified_base 8: mod_base = OTHER; note = 2'-fluoro-cytidine-3'-phosphate
  modified_base 9: mod_base = OTHER; note = 2'-O-methyl-adenosine-3'-phosphate
  modified_base 10: mod_base = OTHER; note = 2'-fluoro-guanosine-3'-phosphate
  modified_base 11: mod_base = OTHER; note = 2'-O-methyl-adenosine-3'-phosphate
  modified_base 12: mod_base = OTHER; note = 2'-fluoro-guanosine-3'-phosphate
  modified_base 13: mod_base = OTHER; note = 2'-O-methyl-uridine-3'-phosphate
  modified_base 14: mod_base = OTHER; note = 2'-fluoro-cytidine-3'-phosphate
  modified_base 15: mod_base = OTHER; note = 2'-O-methyl-uridine-3'-phosphate
  modified_base 16: mod_base = OTHER; note = 2'-fluoro-cytidine-3'-phosphate
  modified_base 17: mod_base = OTHER; note = 2'-O-methyl-adenosine-3'-phosphate
  modified_base 18: mod_base = OTHER; note = 2'-fluoro-guanosine-3'-phosphate
  modified_base 19: mod_base = OTHER; note = 2'-O-methyl-adenosine-3'-phosphate
  modified_base 20: mod_base = OTHER; note = 2'-O-methyl-cytidine-3'-phosphate
  modified_base 21: mod_base = OTHER; note = 2'-O-methyl-adenosine-3'-phosphate
aataagccagagtctcagaca

SEQ ID NO: 575 - RNA, 19 nt, synthetic construct
  source 1..19: mol_type = other RNA
tctgagactctggcttatt

SEQ ID NO: 576 - RNA, 21 nt, synthetic construct
  source 1..21: mol_type = other RNA
  modified_base 1: mod_base = OTHER; note = 2'-O-methyl-adenosine-3'-phosphate
  modified_base 2: mod_base = OTHER; note = 2'-fluoro-adenosine-3'-phosphate
  modified_base 3: mod_base = OTHER; note = 2'-O-methyl-uridine-3'-phosphate
  modified_base 4: mod_base = OTHER; note = 2'-fluoro-adenosine-3'-phosphate
  modified_base 5: mod_base = OTHER; note = 2'-O-methyl-adenosine-3'-phosphate
  modified_base 6: mod_base = OTHER; note = 2'-fluoro-guanosine-3'-phosphate
  modified_base 7: mod_base = OTHER; note = 2'-O-methyl-cytidine-3'-phosphate
  modified_base 8: mod_base = OTHER; note = 2'-fluoro-cytidine-3'-phosphate
  modified_base 9: mod_base = OTHER; note = 2'-O-methyl-adenosine-3'-phosphate
  modified_base 10: mod_base = OTHER; note = 2'-O-methyl-guanosine-3'-phosphate
  modified_base 11: mod_base = OTHER; note = 2'-fluoro-adenosine-3'-phosphate
  modified_base 12: mod_base = OTHER; note = 2'-fluoro-guanosine-3'-phosphate
  modified_base 13: mod_base = OTHER; note = 2'-O-methyl-uridine-3'-phosphate
  modified_base 14: mod_base = OTHER; note = 2'-fluoro-cytidine-3'-phosphate
  modified_base 15: mod_base = OTHER; note = 2'-O-methyl-uridine-3'-phosphate
  modified_base 16: mod_base = OTHER; note = 2'-fluoro-cytidine-3'-phosphate
  modified_base 17: mod_base = OTHER; note = 2'-O-methyl-adenosine-3'-phosphate
  modified_base 18: mod_base = OTHER; note = 2'-fluoro-guanosine-3'-phosphate
  modified_base 19: mod_base = OTHER; note = 2'-O-methyl-adenosine-3'-phosphate
  modified_base 20: mod_base = OTHER; note = 2'-O-methyl-cytidine-3'-phosphate
  modified_base 21: mod_base = OTHER; note = 2'-O-methyl-adenosine-3'-phosphate
aataagccagagtctcagaca

SEQ ID NO: 577 - RNA, 19 nt, synthetic construct
  source 1..19: mol_type = other RNA
tctgagactctggcttatt

SEQ ID NO: 578 - RNA, 21 nt, synthetic construct
  source 1..21: mol_type = other RNA
  modified_base 1: mod_base = OTHER; note = 2'-O-methyl-adenosine-3'-phosphate
  modified_base 2: mod_base = OTHER; note = 2'-O-methyl-adenosine-3'-phosphate
  modified_base 3: mod_base = OTHER; note = 2'-O-methyl-uridine-3'-phosphate
  modified_base 4: mod_base = OTHER; note = 2'-fluoro-adenosine-3'-phosphate
  modified_base 5: mod_base = OTHER; note = 2'-O-methyl-adenosine-3'-phosphate
  modified_base 6: mod_base = OTHER; note = 2'-fluoro-guanosine-3'-phosphate
  modified_base 7: mod_base = OTHER; note = 2'-O-methyl-cytidine-3'-phosphate
  modified_base 8: mod_base = OTHER; note = 2'-fluoro-cytidine-3'-phosphate
  modified_base 9: mod_base = OTHER; note = 2'-O-methyl-adenosine-3'-phosphate
  modified_base 10: mod_base = OTHER; note = 2'-O-methyl-guanosine-3'-phosphate
  modified_base 11: mod_base = OTHER; note = 2'-O-methyl-adenosine-3'-phosphate
  modified_base 12: mod_base = OTHER; note = 2'-fluoro-guanosine-3'-phosphate
  modified_base 13: mod_base = OTHER; note = 2'-O-methyl-uridine-3'-phosphate
  modified_base 14: mod_base = OTHER; note = 2'-fluoro-cytidine-3'-phosphate
  modified_base 15: mod_base = OTHER; note = 2'-O-methyl-uridine-3'-phosphate
  modified_base 16: mod_base = OTHER; note = 2'-fluoro-cytidine-3'-phosphate
  modified_base 17: mod_base = OTHER; note = 2'-O-methyl-adenosine-3'-phosphate
  modified_base 18: mod_base = OTHER; note = 2'-fluoro-guanosine-3'-phosphate
  modified_base 19: mod_base = OTHER; note = 2'-O-methyl-adenosine-3'-phosphate
  modified_base 20: mod_base = OTHER; note = 2'-O-methyl-cytidine-3'-phosphate
  modified_base 21: mod_base = OTHER; note = 2'-O-methyl-adenosine-3'-phosphate
aataagccagagtctcagaca

SEQ ID NO: 579 - RNA, 19 nt, synthetic construct
  source 1..19: mol_type = other RNA
tctgagactctggcttatt

SEQ ID NO: 580 - RNA, 21 nt, synthetic construct
  source 1..21: mol_type = other RNA
  modified_base 1: mod_base = OTHER; note = 2'-O-methyl-adenosine-3'-phosphate
  modified_base 2: mod_base = OTHER; note = 2'-fluoro-adenosine-3'-phosphate
  modified_base 3: mod_base = OTHER; note = 2'-O-methyl-uridine-3'-phosphate
  modified_base 4: mod_base = OTHER; note = 2'-O-methyl-adenosine-3'-phosphate
  modified_base 5: mod_base = OTHER; note = 2'-O-methyl-adenosine-3'-phosphate
  modified_base 6: mod_base = OTHER; note = 2'-fluoro-guanosine-3'-phosphate
  modified_base 7: mod_base = OTHER; note = 2'-O-methyl-cytidine-3'-phosphate
  modified_base 8: mod_base = OTHER; note = 2'-fluoro-cytidine-3'-phosphate
  modified_base 9: mod_base = OTHER; note = 2'-O-methyl-adenosine-3'-phosphate
  modified_base 10: mod_base = OTHER; note = 2'-O-methyl-guanosine-3'-phosphate
  modified_base 11: mod_base = OTHER; note = 2'-O-methyl-adenosine-3'-phosphate
  modified_base 12: mod_base = OTHER; note = 2'-fluoro-guanosine-3'-phosphate
  modified_base 13: mod_base = OTHER; note = 2'-O-methyl-uridine-3'-phosphate
  modified_base 14: mod_base = OTHER; note = 2'-fluoro-cytidine-3'-phosphate
  modified_base 15: mod_base = OTHER; note = 2'-O-methyl-uridine-3'-phosphate
  modified_base 16: mod_base = OTHER; note = 2'-fluoro-cytidine-3'-phosphate
  modified_base 17: mod_base = OTHER; note = 2'-O-methyl-adenosine-3'-phosphate
  modified_base 18: mod_base = OTHER; note = 2'-fluoro-guanosine-3'-phosphate
  modified_base 19: mod_base = OTHER; note = 2'-O-methyl-adenosine-3'-phosphate
  modified_base 20: mod_base = OTHER; note = 2'-O-methyl-cytidine-3'-phosphate
  modified_base 21: mod_base = OTHER; note = 2'-O-methyl-adenosine-3'-phosphate
aataagccagagtctcagaca

SEQ ID NO: 581 - RNA, 19 nt, synthetic construct
  source 1..19: mol_type = other RNA
tctgagactctggcttatt

SEQ ID NO: 582 - RNA, 21 nt, synthetic construct
  source 1..21: mol_type = other RNA
  modified_base 1: mod_base = OTHER; note = 2'-O-methyl-adenosine-3'-phosphate
  modified_base 2: mod_base = OTHER; note = 2'-fluoro-adenosine-3'-phosphate
  modified_base 3: mod_base = OTHER; note = 2'-O-methyl-uridine-3'-phosphate
  modified_base 4: mod_base = OTHER; note = 2'-fluoro-adenosine-3'-phosphate
  modified_base 5: mod_base = OTHER; note = 2'-O-methyl-adenosine-3'-phosphate
  modified_base 6: mod_base = OTHER; note = 2'-O-methyl-guanosine-3'-phosphate
  modified_base 7: mod_base = OTHER; note = 2'-O-methyl-cytidine-3'-phosphate
  modified_base 8: mod_base = OTHER; note = 2'-fluoro-cytidine-3'-phosphate
  modified_base 9: mod_base = OTHER; note = 2'-O-methyl-adenosine-3'-phosphate
  modified_base 10: mod_base = OTHER; note = 2'-O-methyl-guanosine-3'-phosphate
  modified_base 11: mod_base = OTHER; note = 2'-O-methyl-adenosine-3'-phosphate
  modified_base 12: mod_base = OTHER; note = 2'-fluoro-guanosine-3'-phosphate
  modified_base 13: mod_base = OTHER; note = 2'-O-methyl-uridine-3'-phosphate
  modified_base 14: mod_base = OTHER; note = 2'-fluoro-cytidine-3'-phosphate
  modified_base 15: mod_base = OTHER; note = 2'-O-methyl-uridine-3'-phosphate
  modified_base 16: mod_base = OTHER; note = 2'-fluoro-cytidine-3'-phosphate
  modified_base 17: mod_base = OTHER; note = 2'-O-methyl-adenosine-3'-phosphate
  modified_base 18: mod_base = OTHER; note = 2'-fluoro-guanosine-3'-phosphate
  modified_base 19: mod_base = OTHER; note = 2'-O-methyl-adenosine-3'-phosphate
  modified_base 20: mod_base = OTHER; note = 2'-O-methyl-cytidine-3'-phosphate
  modified_base 21: mod_base = OTHER; note = 2'-O-methyl-adenosine-3'-phosphate
aataagccagagtctcagaca

SEQ ID NO: 583 - RNA, 19 nt, synthetic construct
  source 1..19: mol_type = other RNA
tctgagactctggcttatt

SEQ ID NO: 584 - RNA, 21 nt, synthetic construct
  source 1..21: mol_type = other RNA
  modified_base 1: mod_base = OTHER; note = 2'-O-methyl-adenosine-3'-phosphate
  modified_base 2: mod_base = OTHER; note = 2'-fluoro-adenosine-3'-phosphate
  modified_base 3: mod_base = OTHER; note = 2'-O-methyl-uridine-3'-phosphate
  modified_base 4: mod_base = OTHER; note = 2'-fluoro-adenosine-3'-phosphate
  modified_base 5: mod_base = OTHER; note = 2'-O-methyl-adenosine-3'-phosphate
  modified_base 6: mod_base = OTHER; note = 2'-fluoro-guanosine-3'-phosphate
  modified_base 7: mod_base = OTHER; note = 2'-O-methyl-cytidine-3'-phosphate
  modified_base 8: mod_base = OTHER; note = 2'-O-methyl-cytidine-3'-phosphate
  modified_base 9: mod_base = OTHER; note = 2'-O-methyl-adenosine-3'-phosphate
  modified_base 10: mod_base = OTHER; note = 2'-O-methyl-guanosine-3'-phosphate
  modified_base 11: mod_base = OTHER; note = 2'-O-methyl-adenosine-3'-phosphate
  modified_base 12: mod_base = OTHER; note = 2'-fluoro-guanosine-3'-phosphate
  modified_base 13: mod_base = OTHER; note = 2'-O-methyl-uridine-3'-phosphate
  modified_base 14: mod_base = OTHER; note = 2'-fluoro-cytidine-3'-phosphate
  modified_base 15: mod_base = OTHER; note = 2'-O-methyl-uridine-3'-phosphate
  modified_base 16: mod_base = OTHER; note = 2'-fluoro-cytidine-3'-phosphate
  modified_base 17: mod_base = OTHER; note = 2'-O-methyl-adenosine-3'-phosphate
  modified_base 18: mod_base = OTHER; note = 2'-fluoro-guanosine-3'-phosphate
  modified_base 19: mod_base = OTHER; note = 2'-O-methyl-adenosine-3'-phosphate
  modified_base 20: mod_base = OTHER; note = 2'-O-methyl-cytidine-3'-phosphate
  modified_base 21: mod_base = OTHER; note = 2'-O-methyl-adenosine-3'-phosphate
aataagccagagtctcagaca

SEQ ID NO: 585 - RNA, 19 nt, synthetic construct
  source 1..19: mol_type = other RNA
tctgagactctggcttatt

SEQ ID NO: 586 - RNA, 21 nt, synthetic construct
  source 1..21: mol_type = other RNA
  modified_base 1: mod_base = OTHER; note = 2'-O-methyl-adenosine-3'-phosphate
  modified_base 2: mod_base = OTHER; note = 2'-fluoro-adenosine-3'-phosphate
  modified_base 3: mod_base = OTHER; note = 2'-O-methyl-uridine-3'-phosphate
  modified_base 4: mod_base = OTHER; note = 2'-fluoro-adenosine-3'-phosphate
  modified_base 5: mod_base = OTHER; note = 2'-O-methyl-adenosine-3'-phosphate
  modified_base 6: mod_base = OTHER; note = 2'-fluoro-guanosine-3'-phosphate
  modified_base 7: mod_base = OTHER; note = 2'-O-methyl-cytidine-3'-phosphate
  modified_base 8: mod_base = OTHER; note = 2'-fluoro-cytidine-3'-phosphate
  modified_base 9: mod_base = OTHER; note = 2'-O-methyl-adenosine-3'-phosphate
  modified_base 10: mod_base = OTHER; note = 2'-O-methyl-guanosine-3'-phosphate
  modified_base 11: mod_base = OTHER; note = 2'-O-methyl-adenosine-3'-phosphate
  modified_base 12: mod_base = OTHER; note = 2'-O-methyl-guanosine-3'-phosphate
  modified_base 13: mod_base = OTHER; note = 2'-O-methyl-uridine-3'-phosphate
  modified_base 14: mod_base = OTHER; note = 2'-fluoro-cytidine-3'-phosphate
  modified_base 15: mod_base = OTHER; note = 2'-O-methyl-uridine-3'-phosphate
  modified_base 16: mod_base = OTHER; note = 2'-fluoro-cytidine-3'-phosphate
  modified_base 17: mod_base = OTHER; note = 2'-O-methyl-adenosine-3'-phosphate
  modified_base 18: mod_base = OTHER; note = 2'-fluoro-guanosine-3'-phosphate
  modified_base 19: mod_base = OTHER; note = 2'-O-methyl-adenosine-3'-phosphate
  modified_base 20: mod_base = OTHER; note = 2'-O-methyl-cytidine-3'-phosphate
  modified_base 21: mod_base = OTHER; note = 2'-O-methyl-adenosine-3'-phosphate
aataagccagagtctcagaca

SEQ ID NO: 587 - RNA, 19 nt, synthetic construct
  source 1..19: mol_type = other RNA
tctgagactctggcttatt

SEQ ID NO: 588 - RNA, 21 nt, synthetic construct
  source 1..21: mol_type = other RNA
  modified_base 1: mod_base = OTHER; note = 2'-O-methyl-adenosine-3'-phosphate
  modified_base 2: mod_base = OTHER; note = 2'-fluoro-adenosine-3'-phosphate
  modified_base 3: mod_base = OTHER; note = 2'-O-methyl-uridine-3'-phosphate
  modified_base 4: mod_base = OTHER; note = 2'-fluoro-adenosine-3'-phosphate
  modified_base 5: mod_base = OTHER; note = 2'-O-methyl-adenosine-3'-phosphate
  modified_base 6: mod_base = OTHER; note = 2'-fluoro-guanosine-3'-phosphate
  modified_base 7: mod_base = OTHER; note = 2'-O-methyl-cytidine-3'-phosphate
  modified_base 8: mod_base = OTHER; note = 2'-fluoro-cytidine-3'-phosphate
  modified_base 9: mod_base = OTHER; note = 2'-O-methyl-adenosine-3'-phosphate
  modified_base 10: mod_base = OTHER; note = 2'-O-methyl-guanosine-3'-phosphate
  modified_base 11: mod_base = OTHER; note = 2'-O-methyl-adenosine-3'-phosphate
  modified_base 12: mod_base = OTHER; note = 2'-fluoro-guanosine-3'-phosphate
  modified_base 13: mod_base = OTHER; note = 2'-O-methyl-uridine-3'-phosphate
  modified_base 14: mod_base = OTHER; note = 2'-O-methyl-cytidine-3'-phosphate
  modified_base 15: mod_base = OTHER; note = 2'-O-methyl-uridine-3'-phosphate
  modified_base 16: mod_base = OTHER; note = 2'-fluoro-cytidine-3'-phosphate
  modified_base 17: mod_base = OTHER; note = 2'-O-methyl-adenosine-3'-phosphate
  modified_base 18: mod_base = OTHER; note = 2'-fluoro-guanosine-3'-phosphate
  modified_base 19: mod_base = OTHER; note = 2'-O-methyl-adenosine-3'-phosphate
  modified_base 20: mod_base = OTHER; note = 2'-O-methyl-cytidine-3'-phosphate
  modified_base 21: mod_base = OTHER; note = 2'-O-methyl-adenosine-3'-phosphate
aataagccagagtctcagaca

SEQ ID NO: 589 - RNA, 19 nt, synthetic construct
  source 1..19: mol_type = other RNA
tctgagactctggcttatt

SEQ ID NO: 590 - RNA, 21 nt, synthetic construct
  source 1..21: mol_type = other RNA
  modified_base 1: mod_base = OTHER; note = 2'-O-methyl-adenosine-3'-phosphate
  modified_base 2: mod_base = OTHER; note = 2'-fluoro-adenosine-3'-phosphate
  modified_base 3: mod_base = OTHER; note = 2'-O-methyl-uridine-3'-phosphate
  modified_base 4: mod_base = OTHER; note = 2'-fluoro-adenosine-3'-phosphate
  modified_base 5: mod_base = OTHER; note = 2'-O-methyl-adenosine-3'-phosphate
  modified_base 6: mod_base = OTHER; note = 2'-fluoro-guanosine-3'-phosphate
  modified_base 7: mod_base = OTHER; note = 2'-O-methyl-cytidine-3'-phosphate
  modified_base 8: mod_base = OTHER; note = 2'-fluoro-cytidine-3'-phosphate
  modified_base 9: mod_base = OTHER; note = 2'-O-methyl-adenosine-3'-phosphate
  modified_base 10: mod_base = OTHER; note = 2'-O-methyl-guanosine-3'-phosphate
  modified_base 11: mod_base = OTHER; note = 2'-O-methyl-adenosine-3'-phosphate
  modified_base 12: mod_base = OTHER; note = 2'-fluoro-guanosine-3'-phosphate
  modified_base 13: mod_base = OTHER; note = 2'-O-methyl-uridine-3'-phosphate
  modified_base 14: mod_base = OTHER; note = 2'-fluoro-cytidine-3'-phosphate
  modified_base 15: mod_base = OTHER; note = 2'-O-methyl-uridine-3'-phosphate
  modified_base 16: mod_base = OTHER; note = 2'-O-methyl-cytidine-3'-phosphate
  modified_base 17: mod_base = OTHER; note = 2'-O-methyl-adenosine-3'-phosphate
  modified_base 18: mod_base = OTHER; note = 2'-fluoro-guanosine-3'-phosphate
  modified_base 19: mod_base = OTHER; note = 2'-O-methyl-adenosine-3'-phosphate
  modified_base 20: mod_base = OTHER; note = 2'-O-methyl-cytidine-3'-phosphate
  modified_base 21: mod_base = OTHER; note = 2'-O-methyl-adenosine-3'-phosphate
aataagccagagtctcagaca

SEQ ID NO: 591 - RNA, 19 nt, synthetic construct
  source 1..19: mol_type = other RNA
tctgagactctggcttatt

SEQ ID NO: 592 - RNA, 21 nt, synthetic construct
  source 1..21: mol_type = other RNA
  modified_base 1: mod_base = OTHER; note = 2'-O-methyl-adenosine-3'-phosphate
  modified_base 2: mod_base = OTHER; note = 2'-fluoro-adenosine-3'-phosphate
  modified_base 3: mod_base = OTHER; note = 2'-O-methyl-uridine-3'-phosphate
  modified_base 4: mod_base = OTHER; note = 2'-fluoro-adenosine-3'-phosphate
  modified_base 5: mod_base = OTHER; note = 2'-O-methyl-adenosine-3'-phosphate
  modified_base 6: mod_base = OTHER; note = 2'-fluoro-guanosine-3'-phosphate
  modified_base 7: mod_base = OTHER; note = 2'-O-methyl-cytidine-3'-phosphate
  modified_base 8: mod_base = OTHER; note = 2'-fluoro-cytidine-3'-phosphate
  modified_base 9: mod_base = OTHER; note = 2'-O-methyl-adenosine-3'-phosphate
  modified_base 10: mod_base = OTHER; note = 2'-O-methyl-guanosine-3'-phosphate
  modified_base 11: mod_base = OTHER; note = 2'-O-methyl-adenosine-3'-phosphate
  modified_base 12: mod_base = OTHER; note = 2'-fluoro-guanosine-3'-phosphate
  modified_base 13: mod_base = OTHER; note = 2'-O-methyl-uridine-3'-phosphate
  modified_base 14: mod_base = OTHER; note = 2'-fluoro-cytidine-3'-phosphate
  modified_base 15: mod_base = OTHER; note = 2'-O-methyl-uridine-3'-phosphate
  modified_base 16: mod_base = OTHER; note = 2'-fluoro-cytidine-3'-phosphate
  modified_base 17: mod_base = OTHER; note = 2'-O-methyl-adenosine-3'-phosphate
  modified_base 18: mod_base = OTHER; note = 2'-O-methyl-guanosine-3'-phosphate
  modified_base 19: mod_base = OTHER; note = 2'-O-methyl-adenosine-3'-phosphate
  modified_base 20: mod_base = OTHER; note = 2'-O-methyl-cytidine-3'-phosphate
  modified_base 21: mod_base = OTHER; note = 2'-O-methyl-adenosine-3'-phosphate
aataagccagagtctcagaca

SEQ ID NO: 593 - RNA, 19 nt, synthetic construct
  source 1..19: mol_type = other RNA
tctgagactctggcttatt

SEQ ID NO: 594 - RNA, 21 nt, synthetic construct
  source 1..21: mol_type = other RNA
  modified_base 1: mod_base = OTHER; note = 2'-O-methyl-adenosine-3'-thiophosphate-phosphate
  modified_base 2: mod_base = OTHER; note = 2'-fluoro-adenosine-3'-phosphate
  modified_base 3: mod_base = OTHER; note = 2'-O-methyl-uridine-3'-phosphate
  modified_base 4: mod_base = OTHER; note = 2'-fluoro-adenosine-3'-phosphate
  modified_base 5: mod_base = OTHER; note = 2'-O-methyl-adenosine-3'-phosphate
  modified_base 6: mod_base = OTHER; note = 2'-fluoro-guanosine-3'-phosphate
  modified_base 7: mod_base = OTHER; note = 2'-O-methyl-cytidine-3'-phosphate
  modified_base 8: mod_base = OTHER; note = 2'-fluoro-cytidine-3'-phosphate
  modified_base 9: mod_base = OTHER; note = 2'-O-methyl-adenosine-3'-phosphate
  modified_base 10: mod_base = OTHER; note = 2'-O-methyl-guanosine-3'-phosphate
  modified_base 11: mod_base = OTHER; note = 2'-O-methyl-adenosine-3'-phosphate
  modified_base 12: mod_base = OTHER; note = 2'-fluoro-guanosine-3'-phosphate
  modified_base 13: mod_base = OTHER; note = 2'-O-methyl-uridine-3'-phosphate
  modified_base 14: mod_base = OTHER; note = 2'-fluoro-cytidine-3'-phosphate
  modified_base 15: mod_base = OTHER; note = 2'-O-methyl-uridine-3'-phosphate
  modified_base 16: mod_base = OTHER; note = 2'-fluoro-cytidine-3'-phosphate
  modified_base 17: mod_base = OTHER; note = 2'-O-methyl-adenosine-3'-phosphate
  modified_base 18: mod_base = OTHER; note = 2'-fluoro-guanosine-3'-phosphate
  modified_base 19: mod_base = OTHER; note = 2'-O-methyl-adenosine-3'-phosphate
  modified_base 20: mod_base = OTHER; note = 2'-O-methyl-cytidine-3'-thiophosphate-phosphate
  modified_base 21: mod_base = OTHER; note = 2'-O-methyl-adenosine-3'-phosphate
aataagccagagtctcagaca

SEQ ID NO: 595 - RNA, 19 nt, synthetic construct
  source 1..19: mol_type = other RNA
tctgagactctggcttatt

SEQ ID NO: 596 - RNA, 21 nt, synthetic construct
  source 1..21: mol_type = other RNA
  modified_base 1: mod_base = OTHER; note = 2'-O-methyl-adenosine-3'-thiophosphate-phosphate
  modified_base 2: mod_base = OTHER; note = 2'-fluoro-adenosine-3'-thiophosphate-phosphate
  modified_base 3: mod_base = OTHER; note = 2'-O-methyl-uridine-3'-phosphate
  modified_base 4: mod_base = OTHER; note = 2'-fluoro-adenosine-3'-phosphate
  modified_base 5: mod_base = OTHER; note = 2'-O-methyl-adenosine-3'-phosphate
  modified_base 6: mod_base = OTHER; note = 2'-fluoro-guanosine-3'-phosphate
  modified_base 7: mod_base = OTHER; note = 2'-O-methyl-cytidine-3'-phosphate
  modified_base 8: mod_base = OTHER; note = 2'-fluoro-cytidine-3'-phosphate
  modified_base 9: mod_base = OTHER; note = 2'-O-methyl-adenosine-3'-phosphate
  modified_base 10: mod_base = OTHER; note = 2'-O-methyl-guanosine-3'-phosphate
  modified_base 11: mod_base = OTHER; note = 2'-O-methyl-adenosine-3'-phosphate
  modified_base 12: mod_base = OTHER; note = 2'-fluoro-guanosine-3'-phosphate
  modified_base 13: mod_base = OTHER; note = 2'-O-methyl-uridine-3'-phosphate
  modified_base 14: mod_base = OTHER; note = 2'-fluoro-cytidine-3'-phosphate
  modified_base 15: mod_base = OTHER; note = 2'-O-methyl-uridine-3'-phosphate
  modified_base 16: mod_base = OTHER; note = 2'-fluoro-cytidine-3'-phosphate
  modified_base 17: mod_base = OTHER; note = 2'-O-methyl-adenosine-3'-phosphate
  modified_base 18: mod_base = OTHER; note = 2'-fluoro-guanosine-3'-phosphate
  modified_base 19: mod_base = OTHER; note = 2'-O-methyl-adenosine-3'-thiophosphate-phosphate
  modified_base 20: mod_base = OTHER; note = 2'-O-methyl-cytidine-3'-thiophosphate-phosphate
  modified_base 21: mod_base = OTHER; note = 2'-O-methyl-adenosine-3'-phosphate
aataagccagagtctcagaca

SEQ ID NO: 597 - RNA, 19 nt, synthetic construct
  source 1..19: mol_type = other RNA
tctgagactctggcttatt

SEQ ID NO: 598 - RNA, 21 nt, synthetic construct
  source 1..21: mol_type = other RNA
  modified_base 1: mod_base = OTHER; note = 2'-O-methyl-adenosine-3'-phosphate
  modified_base 2: mod_base = OTHER; note = 2'-deoxy-adenosine-3'-phosphate
  modified_base 3: mod_base = OTHER; note = 2'-O-methyl-uridine-3'-phosphate
  modified_base 4: mod_base = OTHER; note = 2'-fluoro-adenosine-3'-phosphate
  modified_base 5: mod_base = OTHER; note = 2'-deoxy-adenosine-3'-phosphate
  modified_base 6: mod_base = OTHER; note = 2'-fluoro-guanosine-3'-phosphate
  modified_base 7: mod_base = OTHER; note = 2'-deoxy-cytidine-3'-phosphate
  modified_base 8: mod_base = OTHER; note = 2'-fluoro-cytidine-3'-phosphate
  modified_base 9: mod_base = OTHER; note = 2'-O-methyl-adenosine-3'-phosphate
  modified_base 10: mod_base = OTHER; note = 2'-O-methyl-guanosine-3'-phosphate
  modified_base 11: mod_base = OTHER; note = 2'-O-methyl-adenosine-3'-phosphate
  modified_base 12: mod_base = OTHER; note = 2'-deoxy-guanosine-3'-phosphate
  modified_base 13: mod_base = OTHER; note = 2'-O-methyl-uridine-3'-phosphate
  modified_base 14: mod_base = OTHER; note = 2'-fluoro-cytidine-3'-phosphate
  modified_base 15: mod_base = OTHER; note = 2'-O-methyl-uridine-3'-phosphate
  modified_base 16: mod_base = OTHER; note = 2'-fluoro-cytidine-3'-phosphate
  modified_base 17: mod_base = OTHER; note = 2'-O-methyl-adenosine-3'-phosphate
  modified_base 18: mod_base = OTHER; note = 2'-fluoro-guanosine-3'-phosphate
  modified_base 19: mod_base = OTHER; note = 2'-O-methyl-adenosine-3'-phosphate
  modified_base 20: mod_base = OTHER; note = 2'-O-methyl-cytidine-3'-phosphate
  modified_base 21: mod_base = OTHER; note = 2'-O-methyl-adenosine-3'-phosphate
aataagccagagtctcagaca

SEQ ID NO: 599 - RNA, 19 nt, synthetic construct
  source 1..19: mol_type = other RNA
tctgagactctggcttatt

SEQ ID NO: 600 - RNA, 21 nt, synthetic construct
  source 1..21: mol_type = other RNA
  modified_base 1: mod_base = OTHER; note = 2'-O-methyl-adenosine-3'-phosphate
  modified_base 2: mod_base = OTHER; note = 2'-fluoro-adenosine-3'-phosphate
  modified_base 3: mod_base = OTHER; note = 2'-O-methyl-uridine-3'-phosphate
  modified_base 4: mod_base = OTHER; note = 2'-fluoro-adenosine-3'-phosphate
  modified_base 5: mod_base = OTHER; note = 2'-O-methyl-adenosine-3'-phosphate
  modified_base 6: mod_base = OTHER; note = 2'-fluoro-hypoxanthine-3'-phosphate
  modified_base 7: mod_base = OTHER; note = 2'-O-methyl-cytidine-3'-phosphate
  modified_base 8: mod_base = OTHER; note = 2'-fluoro-cytidine-3'-phosphate
  modified_base 9: mod_base = OTHER; note = 2'-O-methyl-adenosine-3'-phosphate
  modified_base 10: mod_base = OTHER; note = 2'-O-methyl-guanosine-3'-phosphate
  modified_base 11: mod_base = OTHER; note = 2'-O-methyl-adenosine-3'-phosphate
  modified_base 12: mod_base = OTHER; note = 2'-fluoro-guanosine-3'-phosphate
  modified_base 13: mod_base = OTHER; note = 2'-O-methyl-uridine-3'-phosphate
  modified_base 14: mod_base = OTHER; note = 2'-fluoro-cytidine-3'-phosphate
  modified_base 15: mod_base = OTHER; note = 2'-O-methyl-uridine-3'-phosphate
  modified_base 16: mod_base = OTHER; note = 2'-fluoro-cytidine-3'-phosphate
  modified_base 17: mod_base = OTHER; note = 2'-O-methyl-adenosine-3'-phosphate
  modified_base 18: mod_base = OTHER; note = 2'-fluoro-guanosine-3'-phosphate
  modified_base 19: mod_base = OTHER; note = 2'-O-methyl-adenosine-3'-phosphate
  modified_base 20: mod_base = OTHER; note = 2'-O-methyl-cytidine-3'-phosphate
  modified_base 21: mod_base = OTHER; note = 2'-O-methyl-adenosine-3'-phosphate
aataanccagagtctcagaca

SEQ ID NO: 601 - RNA, 19 nt, synthetic construct
  source 1..19: mol_type = other RNA
  modified_base 1: mod_base = OTHER; note = 2'-O-methyl-uridine-3'-phosphate
  modified_base 2: mod_base = OTHER; note = 2'-O-methyl-cytidine-3'-phosphate
  modified_base 3: mod_base = OTHER; note = 2'-O-methyl-uridine-3'-phosphate
  modified_base 4: mod_base = OTHER; note = 2'-O-methyl-guanosine-3'-phosphate
  modified_base 5: mod_base = OTHER; note = 2'-fluoro-adenosine-3'-phosphate
  modified_base 6: mod_base = OTHER; note = 2'-fluoro-guanosine-3'-phosphate
  modified_base 7: mod_base = OTHER; note = 2'-fluoro-adenosine-3'-phosphate
  modified_base 8: mod_base = OTHER; note = 2'-fluoro-cytidine-3'-phosphate
  modified_base 9: mod_base = OTHER; note = 2'-fluoro-uridine-3'-phosphate
  modified_base 10: mod_base = OTHER; note = 2'-fluoro-cytidine-3'-phosphate
  modified_base 11: mod_base = OTHER; note = 2'-O-methyl-uridine-3'-phosphate
  modified_base 12: mod_base = OTHER; note = 2'-O-methyl-guanosine-3'-phosphate
  modified_base 13: mod_base = OTHER; note = 2'-O-methyl-guanosine-3'-phosphate
  modified_base 14: mod_base = OTHER; note = 2'-O-methyl-cytidine-3'-phosphate
  modified_base 15: mod_base = OTHER; note = 2'-O-methyl-uridine-3'-phosphate
  modified_base 16: mod_base = OTHER; note = 2'-O-methyl-uridine-3'-phosphate
  modified_base 17: mod_base = OTHER; note = 2'-O-methyl-adenosine-3'-phosphate
  modified_base 18: mod_base = OTHER; note = 2'-O-methyl-uridine-3'-phosphate
  modified_base 19: mod_base = OTHER; note = 2'-O-methyl-uridine-3'-phosphate
tctgagactctggcttatt

SEQ ID NO: 602 - RNA, 21 nt, synthetic construct
  source 1..21: mol_type = other RNA
aataagccagagtctcagaca

SEQ ID NO: 603 - RNA, 19 nt, synthetic construct
  source 1..19: mol_type = other RNA
  modified_base 1: mod_base = OTHER; note = 2'-O-methyl-uridine-3'-phosphate
  modified_base 2: mod_base = OTHER; note = 2'-O-methyl-cytidine-3'-phosphate
  modified_base 3: mod_base = OTHER; note = 2'-O-methyl-uridine-3'-phosphate
  modified_base 4: mod_base = OTHER; note = 2'-O-methyl-guanosine-3'-phosphate
  modified_base 5: mod_base = OTHER; note = 2'-O-methyl-adenosine-3'-phosphate
  modified_base 6: mod_base = OTHER; note = 2'-fluoro-guanosine-3'-phosphate
  modified_base 7: mod_base = OTHER; note = 2'-fluoro-adenosine-3'-phosphate
  modified_base 8: mod_base = OTHER; note = 2'-fluoro-cytidine-3'-phosphate
  modified_base 9: mod_base = OTHER; note = 2'-fluoro-uridine-3'-phosphate
  modified_base 10: mod_base = OTHER; note = 2'-fluoro-cytidine-3'-phosphate
  modified_base 11: mod_base = OTHER; note = 2'-O-methyl-uridine-3'-phosphate
  modified_base 12: mod_base = OTHER; note = 2'-O-methyl-guanosine-3'-phosphate
  modified_base 13: mod_base = OTHER; note = 2'-O-methyl-guanosine-3'-phosphate
  modified_base 14: mod_base = OTHER; note = 2'-O-methyl-cytidine-3'-phosphate
  modified_base 15: mod_base = OTHER; note = 2'-O-methyl-uridine-3'-phosphate
  modified_base 16: mod_base = OTHER; note = 2'-O-methyl-uridine-3'-phosphate
  modified_base 17: mod_base = OTHER; note = 2'-O-methyl-adenosine-3'-phosphate
  modified_base 18: mod_base = OTHER; note = 2'-O-methyl-uridine-3'-phosphate
  modified_base 19: mod_base = OTHER; note = 2'-O-methyl-uridine-3'-phosphate
tctgagactctggcttatt

SEQ ID NO: 604 - RNA, 21 nt, synthetic construct
  source 1..21: mol_type = other RNA
aataagccagagtctcagaca

SEQ ID NO: 605 - RNA, 19 nt, synthetic construct
  source 1..19: mol_type = other RNA
  modified_base 1: mod_base = OTHER; note = 2'-O-methyl-uridine-3'-phosphate
  modified_base 2: mod_base = OTHER; note = 2'-O-methyl-cytidine-3'-phosphate
  modified_base 3: mod_base = OTHER; note = 2'-O-methyl-uridine-3'-phosphate
  modified_base 4: mod_base = OTHER; note = 2'-O-methyl-guanosine-3'-phosphate
  modified_base 5: mod_base = OTHER; note = 2'-O-methyl-adenosine-3'-phosphate
  modified_base 6: mod_base = OTHER; note = 2'-O-methyl-guanosine-3'-phosphate
  modified_base 7: mod_base = OTHER; note = 2'-fluoro-adenosine-3'-phosphate
  modified_base 8: mod_base = OTHER; note = 2'-fluoro-cytidine-3'-phosphate
  modified_base 9: mod_base = OTHER; note = 2'-fluoro-uridine-3'-phosphate
  modified_base 10: mod_base = OTHER; note = 2'-fluoro-cytidine-3'-phosphate
  modified_base 11: mod_base = OTHER; note = 2'-O-methyl-uridine-3'-phosphate
  modified_base 12: mod_base = OTHER; note = 2'-O-methyl-guanosine-3'-phosphate
  modified_base 13: mod_base = OTHER; note = 2'-O-methyl-guanosine-3'-phosphate
  modified_base 14: mod_base = OTHER; note = 2'-O-methyl-cytidine-3'-phosphate
  modified_base 15: mod_base = OTHER; note = 2'-O-methyl-uridine-3'-phosphate
  modified_base 16: mod_base = OTHER; note = 2'-O-methyl-uridine-3'-phosphate
  modified_base 17: mod_base = OTHER; note = 2'-O-methyl-adenosine-3'-phosphate
  modified_base 18: mod_base = OTHER; note = 2'-O-methyl-uridine-3'-phosphate
  modified_base 19: mod_base = OTHER; note = 2'-O-methyl-uridine-3'-phosphate
tctgagactctggcttatt

SEQ ID NO: 606 - RNA, 21 nt, synthetic construct
  source 1..21: mol_type = other RNA
aataagccagagtctcagaca

SEQ ID NO: 607 - RNA, 19 nt, synthetic construct
  source 1..19: mol_type = other RNA
  modified_base 1: mod_base = OTHER; note = 2'-O-methyl-uridine-3'-phosphate
  modified_base 2: mod_base = OTHER; note = 2'-O-methyl-cytidine-3'-phosphate
  modified_base 3: mod_base = OTHER; note = 2'-O-methyl-uridine-3'-phosphate
  modified_base 4: mod_base = OTHER; note = 2'-O-methyl-guanosine-3'-phosphate
  modified_base 5: mod_base = OTHER; note = 2'-O-methyl-adenosine-3'-phosphate
  modified_base 6: mod_base = OTHER; note = 2'-O-methyl-guanosine-3'-phosphate
  modified_base 7: mod_base = OTHER; note = 2'-O-methyl-adenosine-3'-phosphate
  modified_base 8: mod_base = OTHER; note = 2'-fluoro-cytidine-3'-phosphate
  modified_base 9: mod_base = OTHER; note = 2'-fluoro-uridine-3'-phosphate
  modified_base 10: mod_base = OTHER; note = 2'-fluoro-cytidine-3'-phosphate
  modified_base 11: mod_base = OTHER; note = 2'-O-methyl-uridine-3'-phosphate
  modified_base 12: mod_base = OTHER; note = 2'-O-methyl-guanosine-3'-phosphate
  modified_base 13: mod_base = OTHER; note = 2'-O-methyl-guanosine-3'-phosphate
  modified_base 14: mod_base = OTHER; note = 2'-O-methyl-cytidine-3'-phosphate
  modified_base 15: mod_base = OTHER; note = 2'-O-methyl-uridine-3'-phosphate
  modified_base 16: mod_base = OTHER; note = 2'-O-methyl-uridine-3'-phosphate
  modified_base 17: mod_base = OTHER; note = 2'-O-methyl-adenosine-3'-phosphate
  modified_base 18: mod_base = OTHER; note = 2'-O-methyl-uridine-3'-phosphate
  modified_base 19: mod_base = OTHER; note = 2'-O-methyl-uridine-3'-phosphate
tctgagactctggcttatt

SEQ ID NO: 608 - RNA, 21 nt, synthetic construct
  source 1..21: mol_type = other RNA
aataagccagagtctcagaca

SEQ ID NO: 609 - RNA, 19 nt, synthetic construct
  source 1..19: mol_type = other RNA
  modified_base 1: mod_base = OTHER; note = 2'-O-methyl-uridine-3'-phosphate
  modified_base 2: mod_base = OTHER; note = 2'-O-methyl-cytidine-3'-phosphate
  modified_base 3: mod_base = OTHER; note = 2'-O-methyl-uridine-3'-phosphate
  modified_base 4: mod_base = OTHER; note = 2'-O-methyl-guanosine-3'-phosphate
  modified_base 5: mod_base = OTHER; note = 2'-fluoro-adenosine-3'-phosphate
  modified_base 6: mod_base = OTHER; note = 2'-O-methyl-guanosine-3'-phosphate
  modified_base 7: mod_base = OTHER; note = 2'-O-methyl-adenosine-3'-phosphate
  modified_base 8: mod_base = OTHER; note = 2'-O-methyl-cytidine-3'-phosphate
  modified_base 9: mod_base = OTHER; note = 2'-fluoro-uridine-3'-phosphate
  modified_base 10: mod_base = OTHER; note = 2'-fluoro-cytidine-3'-phosphate
  modified_base 11: mod_base = OTHER; note = 2'-O-methyl-uridine-3'-phosphate
  modified_base 12: mod_base = OTHER; note = 2'-O-methyl-guanosine-3'-phosphate
  modified_base 13: mod_base = OTHER; note = 2'-O-methyl-guanosine-3'-phosphate
  modified_base 14: mod_base = OTHER; note = 2'-O-methyl-cytidine-3'-phosphate
  modified_base 15: mod_base = OTHER; note = 2'-O-methyl-uridine-3'-phosphate
  modified_base 16: mod_base = OTHER; note = 2'-O-methyl-uridine-3'-phosphate
  modified_base 17: mod_base = OTHER; note = 2'-O-methyl-adenosine-3'-phosphate
  modified_base 18: mod_base = OTHER; note = 2'-O-methyl-uridine-3'-phosphate
  modified_base 19: mod_base = OTHER; note = 2'-O-methyl-uridine-3'-phosphate
tctgagactctggcttatt

SEQ ID NO: 610 - RNA, 21 nt, synthetic construct
  source 1..21: mol_type = other RNA
aataagccagagtctcagaca

SEQ ID NO: 611 - RNA, 19 nt, synthetic construct
  source 1..19: mol_type = other RNA
  modified_base 1: mod_base = OTHER; note = 2'-O-methyl-uridine-3'-phosphate
  modified_base 2: mod_base = OTHER; note = 2'-O-methyl-cytidine-3'-phosphate
  modified_base 3: mod_base = OTHER; note = 2'-O-methyl-uridine-3'-phosphate
  modified_base 4: mod_base = OTHER; note = 2'-O-methyl-guanosine-3'-phosphate
  modified_base 5: mod_base = OTHER; note = 2'-fluoro-adenosine-3'-phosphate
  modified_base 6: mod_base = OTHER; note = 2'-fluoro-guanosine-3'-phosphate
  modified_base 7: mod_base = OTHER; note = 2'-O-methyl-adenosine-3'-phosphate
  modified_base 8: mod_base = OTHER; note = 2'-O-methyl-cytidine-3'-phosphate
  modified_base 9: mod_base = OTHER; note = 2'-O-methyl-uridine-3'-phosphate
  modified_base 10: mod_base = OTHER; note = 2'-fluoro-cytidine-3'-phosphate
  modified_base 11: mod_base = OTHER; note = 2'-O-methyl-uridine-3'-phosphate
  modified_base 12: mod_base = OTHER; note = 2'-O-methyl-guanosine-3'-phosphate
  modified_base 13: mod_base = OTHER; note = 2'-O-methyl-guanosine-3'-phosphate
  modified_base 14: mod_base = OTHER; note = 2'-O-methyl-cytidine-3'-phosphate
  modified_base 15: mod_base = OTHER; note = 2'-O-methyl-uridine-3'-phosphate
  modified_base 16: mod_base = OTHER; note = 2'-O-methyl-uridine-3'-phosphate
  modified_base 17: mod_base = OTHER; note = 2'-O-methyl-adenosine-3'-phosphate
  modified_base 18: mod_base = OTHER; note = 2'-O-methyl-uridine-3'-phosphate
  modified_base 19: mod_base = OTHER; note = 2'-O-methyl-uridine-3'-phosphate
tctgagactctggcttatt

SEQ ID NO: 612 - RNA, 21 nt, synthetic construct
  source 1..21: mol_type = other RNA
aataagccagagtctcagaca

SEQ ID NO: 613 - RNA, 19 nt, synthetic construct
  source 1..19: mol_type = other RNA
  modified_base 1: mod_base = OTHER; note = 2'-O-methyl-uridine-3'-phosphate
  modified_base 2: mod_base = OTHER; note = 2'-O-methyl-cytidine-3'-phosphate
  modified_base 3: mod_base = OTHER; note = 2'-O-methyl-uridine-3'-phosphate
  modified_base 4: mod_base = OTHER; note = 2'-O-methyl-guanosine-3'-phosphate
  modified_base 5: mod_base = OTHER; note = 2'-fluoro-adenosine-3'-phosphate
  modified_base 6: mod_base = OTHER; note = 2'-fluoro-guanosine-3'-phosphate
  modified_base 7: mod_base = OTHER; note = 2'-fluoro-adenosine-3'-phosphate
  modified_base 8: mod_base = OTHER; note = 2'-O-methyl-cytidine-3'-phosphate
  modified_base 9: mod_base = OTHER; note = 2'-O-methyl-uridine-3'-phosphate
  modified_base 10: mod_base = OTHER; note = 2'-O-methyl-cytidine-3'-phosphate
  modified_base 11: mod_base = OTHER; note = 2'-O-methyl-uridine-3'-phosphate
  modified_base 12: mod_base = OTHER; note = 2'-O-methyl-guanosine-3'-phosphate
  modified_base 13: mod_base = OTHER; note = 2'-O-methyl-guanosine-3'-phosphate
  modified_base 14: mod_base = OTHER; note = 2'-O-methyl-cytidine-3'-phosphate
  modified_base 15: mod_base = OTHER; note = 2'-O-methyl-uridine-3'-phosphate
  modified_base 16: mod_base = OTHER; note = 2'-O-methyl-uridine-3'-phosphate
  modified_base 17: mod_base = OTHER; note = 2'-O-methyl-adenosine-3'-phosphate
  modified_base 18: mod_base = OTHER; note = 2'-O-methyl-uridine-3'-phosphate
  modified_base 19: mod_base = OTHER; note = 2'-O-methyl-uridine-3'-phosphate
tctgagactctggcttatt

SEQ ID NO: 614 - RNA, 21 nt, synthetic construct
  source 1..21: mol_type = other RNA
aataagccagagtctcagaca

SEQ ID NO: 615 - RNA, 19 nt, synthetic construct
  source 1..19: mol_type = other RNA
  modified_base 1: mod_base = OTHER; note = 2'-O-methyl-uridine-3'-phosphate
  modified_base 2: mod_base = OTHER; note = 2'-O-methyl-cytidine-3'-phosphate
  modified_base 3: mod_base = OTHER; note = 2'-O-methyl-uridine-3'-phosphate
  modified_base 4: mod_base = OTHER; note = 2'-O-methyl-guanosine-3'-phosphate
  modified_base 5: mod_base = OTHER; note = 2'-fluoro-adenosine-3'-phosphate
  modified_base 6: mod_base = OTHER; note = 2'-fluoro-guanosine-3'-phosphate
  modified_base 7: mod_base = OTHER; note = 2'-fluoro-adenosine-3'-phosphate
  modified_base 8: mod_base = OTHER; note = 2'-fluoro-cytidine-3'-phosphate
  modified_base 9: mod_base = OTHER; note = 2'-O-methyl-uridine-3'-phosphate
  modified_base 10: mod_base = OTHER; note = 2'-O-methyl-cytidine-3'-phosphate
  modified_base 11: mod_base = OTHER; note = 2'-O-methyl-uridine-3'-phosphate
  modified_base 12: mod_base = OTHER; note = 2'-O-methyl-guanosine-3'-phosphate
  modified_base 13: mod_base = OTHER; note = 2'-O-methyl-guanosine-3'-phosphate
  modified_base 14: mod_base = OTHER; note = 2'-O-methyl-cytidine-3'-phosphate
  modified_base 15: mod_base = OTHER; note = 2'-O-methyl-uridine-3'-phosphate
  modified_base 16: mod_base = OTHER; note = 2'-O-methyl-uridine-3'-phosphate
  modified_base 17: mod_base = OTHER; note = 2'-O-methyl-adenosine-3'-phosphate
  modified_base 18: mod_base = OTHER; note = 2'-O-methyl-uridine-3'-phosphate
  modified_base 19: mod_base = OTHER; note = 2'-O-methyl-uridine-3'-phosphate
tctgagactctggcttatt

SEQ ID NO: 616 - RNA, 21 nt, synthetic construct
  source 1..21: mol_type = other RNA
aataagccagagtctcagaca

SEQ ID NO: 617 - RNA, 19 nt, synthetic construct
  source 1..19: mol_type = other RNA
  modified_base 1: mod_base = OTHER; note = 2'-O-methyl-uridine-3'-phosphate
  modified_base 2: mod_base = OTHER; note = 2'-O-methyl-cytidine-3'-phosphate
  modified_base 3: mod_base = OTHER; note = 2'-O-methyl-uridine-3'-phosphate
  modified_base 4: mod_base = OTHER; note = 2'-O-methyl-guanosine-3'-phosphate
  modified_base 5: mod_base = OTHER; note = 2'-fluoro-adenosine-3'-phosphate
  modified_base 6: mod_base = OTHER; note = 2'-fluoro-guanosine-3'-phosphate
  modified_base 7: mod_base = OTHER; note = 2'-fluoro-adenosine-3'-phosphate
  modified_base 8: mod_base = OTHER; note = 2'-fluoro-cytidine-3'-phosphate
  modified_base 9: mod_base = OTHER; note = 2'-fluoro-uridine-3'-phosphate
  modified_base 10: mod_base = OTHER; note = 2'-O-methyl-cytidine-3'-phosphate
  modified_base 11: mod_base = OTHER; note = 2'-O-methyl-uridine-3'-phosphate
  modified_base 12: mod_base = OTHER; note = 2'-O-methyl-guanosine-3'-phosphate
  modified_base 13: mod_base = OTHER; note = 2'-O-methyl-guanosine-3'-phosphate
  modified_base 14: mod_base = OTHER; note = 2'-O-methyl-cytidine-3'-phosphate
  modified_base 15: mod_base = OTHER; note = 2'-O-methyl-uridine-3'-phosphate
  modified_base 16: mod_base = OTHER; note = 2'-O-methyl-uridine-3'-phosphate
  modified_base 17: mod_base = OTHER; note = 2'-O-methyl-adenosine-3'-phosphate
  modified_base 18: mod_base = OTHER; note = 2'-O-methyl-uridine-3'-phosphate
  modified_base 19: mod_base = OTHER; note = 2'-O-methyl-uridine-3'-phosphate
tctgagactctggcttatt

SEQ ID NO: 618 - RNA, 21 nt, synthetic construct
  source 1..21: mol_type = other RNA
aataagccagagtctcagaca

SEQ ID NO: 619 - RNA, 19 nt, synthetic construct
  source 1..19: mol_type = other RNA
  modified_base 1: mod_base = OTHER; note = 2'-O-methyl-uridine-3'-thiophosphate-phosphate
  modified_base 2: mod_base = OTHER; note = 2'-O-methyl-cytidine-3'-phosphate
  modified_base 3: mod_base = OTHER; note = 2'-O-methyl-uridine-3'-phosphate
  modified_base 4: mod_base = OTHER; note = 2'-O-methyl-guanosine-3'-phosphate
  modified_base 5: mod_base = OTHER; note = 2'-fluoro-adenosine-3'-phosphate
  modified_base 6: mod_base = OTHER; note = 2'-fluoro-guanosine-3'-phosphate
  modified_base 7: mod_base = OTHER; note = 2'-fluoro-adenosine-3'-phosphate
  modified_base 8: mod_base = OTHER; note = 2'-fluoro-cytidine-3'-phosphate
  modified_base 9: mod_base = OTHER; note = 2'-fluoro-uridine-3'-phosphate
  modified_base 10: mod_base = OTHER; note = 2'-fluoro-cytidine-3'-phosphate
  modified_base 11: mod_base = OTHER; note = 2'-O-methyl-uridine-3'-phosphate
  modified_base 12: mod_base = OTHER; note = 2'-O-methyl-guanosine-3'-phosphate
  modified_base 13: mod_base = OTHER; note = 2'-O-methyl-guanosine-3'-phosphate
  modified_base 14: mod_base = OTHER; note = 2'-O-methyl-cytidine-3'-phosphate
  modified_base 15: mod_base = OTHER; note = 2'-O-methyl-uridine-3'-phosphate
  modified_base 16: mod_base = OTHER; note = 2'-O-methyl-uridine-3'-phosphate
  modified_base 17: mod_base = OTHER; note = 2'-O-methyl-adenosine-3'-phosphate
  modified_base 18: mod_base = OTHER; note = 2'-O-methyl-uridine-3'-phosphate
  modified_base 19: mod_base = OTHER; note = 2'-O-methyl-uridine-3'-phosphate
tctgagactctggcttatt

SEQ ID NO: 620 - RNA, 21 nt, synthetic construct
  source 1..21: mol_type = other RNA
aataagccagagtctcagaca

SEQ ID NO: 621 - RNA, 19 nt, synthetic construct
  source 1..19: mol_type = other RNA
  modified_base 1: mod_base = OTHER; note = 2'-O-methyl-uridine-3'-thiophosphate-phosphate
  modified_base 2: mod_base = OTHER; note = 2'-O-methyl-cytidine-3'-thiophosphate-phosphate
  modified_base 3: mod_base = OTHER; note = 2'-O-methyl-uridine-3'-phosphate
  modified_base 4: mod_base = OTHER; note = 2'-O-methyl-guanosine-3'-phosphate
  modified_base 5: mod_base = OTHER; note = 2'-fluoro-adenosine-3'-phosphate
  modified_base 6: mod_base = OTHER; note = 2'-fluoro-guanosine-3'-phosphate
  modified_base 7: mod_base = OTHER; note = 2'-fluoro-adenosine-3'-phosphate
  modified_base 8: mod_base = OTHER; note = 2'-fluoro-cytidine-3'-phosphate
  modified_base 9: mod_base = OTHER; note = 2'-fluoro-uridine-3'-phosphate
  modified_base 10: mod_base = OTHER; note = 2'-fluoro-cytidine-3'-phosphate
  modified_base 11: mod_base = OTHER; note = 2'-O-methyl-uridine-3'-phosphate
  modified_base 12: mod_base = OTHER; note = 2'-O-methyl-guanosine-3'-phosphate
  modified_base 13: mod_base = OTHER; note = 2'-O-methyl-guanosine-3'-phosphate
  modified_base 14: mod_base = OTHER; note = 2'-O-methyl-cytidine-3'-phosphate
  modified_base 15: mod_base = OTHER; note = 2'-O-methyl-uridine-3'-phosphate
  modified_base 16: mod_base = OTHER; note = 2'-O-methyl-uridine-3'-phosphate
  modified_base 17: mod_base = OTHER; note = 2'-O-methyl-adenosine-3'-phosphate
  modified_base 18: mod_base = OTHER; note = 2'-O-methyl-uridine-3'-phosphate
  modified_base 19: mod_base = OTHER; note = 2'-O-methyl-uridine-3'-phosphate
tctgagactctggcttatt

SEQ ID NO: 622 - RNA, 21 nt, synthetic construct
  source 1..21: mol_type = other RNA
aataagccagagtctcagaca

SEQ ID NO: 623 - RNA, 19 nt, synthetic construct
  source 1..19: mol_type = other RNA
  modified_base 1: mod_base = OTHER; note = 2'-O-methyl-uridine-3'-phosphate
  modified_base 2: mod_base = OTHER; note = 2'-O-methyl-cytidine-3'-phosphate
  modified_base 3: mod_base = OTHER; note = 2'-O-methyl-uridine-3'-phosphate
  modified_base 4: mod_base = OTHER; note = 2'-O-methyl-guanosine-3'-phosphate
  modified_base 5: mod_base = OTHER; note = 2'-fluoro-adenosine-3'-phosphate
  modified_base 6: mod_base = OTHER; note = 2'-fluoro-guanosine-3'-phosphate
  modified_base 7: mod_base = OTHER; note = 2'-fluoro-adenosine-3'-phosphate
  modified_base 8: mod_base = OTHER; note = 2'-fluoro-cytidine-3'-phosphate
  modified_base 9: mod_base = OTHER; note = 2'-fluoro-uridine-3'-phosphate
  modified_base 10: mod_base = OTHER; note = 2'-fluoro-cytidine-3'-phosphate
  modified_base 11: mod_base = OTHER; note = 2'-O-methyl-uridine-3'-phosphate
  modified_base 12: mod_base = OTHER; note = 2'-O-methyl-guanosine-3'-phosphate
  modified_base 13: mod_base = OTHER; note = 2'-O-methyl-guanosine-3'-phosphate
  modified_base 14: mod_base = OTHER; note = 2'-O-methyl-cytidine-3'-phosphate
  modified_base 15: mod_base = OTHER; note = 2'-O-methyl-uridine-3'-phosphate
  modified_base 16: mod_base = OTHER; note = 2'-O-methyl-uridine-3'-phosphate
  modified_base 17: mod_base = OTHER; note = 2'-O-methyl-adenosine-3'-phosphate
  modified_base 18: mod_base = OTHER; note = 2'-O-methyl-uridine-3'-phosphate
  modified_base 19: mod_base = OTHER; note = inverted 2'-deoxy-thymine-3'-phosphate
tctgagactctggcttatt

SEQ ID NO: 624 - RNA, 21 nt, synthetic construct
  source 1..21: mol_type = other RNA
aataagccagagtctcagaca

SEQ ID NO: 625 - RNA, 19 nt, synthetic construct
  source 1..19: mol_type = other RNA
  modified_base 1: mod_base = OTHER; note = 2'-O-methyl-uridine-3'-thiophosphate-phosphate
  modified_base 2: mod_base = OTHER; note = 2'-O-methyl-cytidine-3'-thiophosphate-phosphate
  modified_base 3: mod_base = OTHER; note = 2'-O-methyl-uridine-3'-phosphate
  modified_base 4: mod_base = OTHER; note = 2'-O-methyl-guanosine-3'-phosphate
  modified_base 5: mod_base = OTHER; note = 2'-fluoro-adenosine-3'-phosphate
  modified_base 6: mod_base = OTHER; note = 2'-fluoro-guanosine-3'-phosphate
  modified_base 7: mod_base = OTHER; note = 2'-fluoro-adenosine-3'-phosphate
  modified_base 8: mod_base = OTHER; note = 2'-fluoro-cytidine-3'-phosphate
  modified_base 9: mod_base = OTHER; note = 2'-fluoro-uridine-3'-phosphate
  modified_base 10: mod_base = OTHER; note = 2'-fluoro-cytidine-3'-phosphate
  modified_base 11: mod_base = OTHER; note = 2'-O-methyl-uridine-3'-phosphate
  modified_base 12: mod_base = OTHER; note = 2'-O-methyl-guanosine-3'-phosphate
  modified_base 13: mod_base = OTHER; note = 2'-O-methyl-guanosine-3'-phosphate
  modified_base 14: mod_base = OTHER; note = 2'-O-methyl-cytidine-3'-phosphate
  modified_base 15: mod_base = OTHER; note = 2'-O-methyl-uridine-3'-phosphate
  modified_base 16: mod_base = OTHER; note = 2'-O-methyl-uridine-3'-phosphate
  modified_base 17: mod_base = OTHER; note = 2'-O-methyl-adenosine-3'-phosphate
  modified_base 18: mod_base = OTHER; note = 2'-O-methyl-uridine-3'-phosphate
  modified_base 19: mod_base = OTHER; note = 2'-O-methyl-uridine-3'-phosphate
tctgagactctggcttatt

SEQ ID NO: 626 - RNA, 21 nt, synthetic construct
  source 1..21: mol_type = other RNA
  modified_base 1: mod_base = OTHER; note = 2'-O-methyl-adenosine-3'-thiophosphate-phosphate
  modified_base 2: mod_base = OTHER; note = 2'-fluoro-adenosine-3'-thiophosphate-phosphate
  modified_base 3: mod_base = OTHER; note = 2'-O-methyl-uridine-3'-phosphate
  modified_base 4: mod_base = OTHER; note = 2'-fluoro-adenosine-3'-phosphate
  modified_base 5: mod_base = OTHER; note = 2'-O-methyl-adenosine-3'-phosphate
  modified_base 6: mod_base = OTHER; note = 2'-fluoro-guanosine-3'-phosphate
  modified_base 7: mod_base = OTHER; note = 2'-O-methyl-cytidine-3'-phosphate
  modified_base 8: mod_base = OTHER; note = 2'-fluoro-cytidine-3'-phosphate
  modified_base 9: mod_base = OTHER; note = 2'-O-methyl-adenosine-3'-phosphate
  modified_base 10: mod_base = OTHER; note = 2'-O-methyl-guanosine-3'-phosphate
  modified_base 11: mod_base = OTHER; note = 2'-O-methyl-adenosine-3'-phosphate
  modified_base 12: mod_base = OTHER; note = 2'-fluoro-guanosine-3'-phosphate
  modified_base 13: mod_base = OTHER; note = 2'-O-methyl-uridine-3'-phosphate
  modified_base 14: mod_base = OTHER; note = 2'-fluoro-cytidine-3'-phosphate
  modified_base 15: mod_base = OTHER; note = 2'-O-methyl-uridine-3'-phosphate
  modified_base 16: mod_base = OTHER; note = 2'-fluoro-cytidine-3'-phosphate
  modified_base 17: mod_base = OTHER; note = 2'-O-methyl-adenosine-3'-phosphate
  modified_base 18: mod_base = OTHER; note = 2'-fluoro-guanosine-3'-phosphate
  modified_base 19: mod_base = OTHER; note = 2'-O-methyl-adenosine-3'-thiophosphate-phosphate
  modified_base 20: mod_base = OTHER; note = 2'-O-methyl-cytidine-3'-thiophosphate-phosphate
  modified_base 21: mod_base = OTHER; note = 2'-O-methyl-adenosine-3'-phosphate
aataagccagagtctcagaca

SEQ ID NO: 627 - RNA, 19 nt, synthetic construct
  source 1..19: mol_type = other RNA
  modified_base 1: mod_base = OTHER; note = inverted 2'-deoxy-thymine-3'-phosphate
  modified_base 2: mod_base = OTHER; note = 2'-O-methyl-cytidine-3'-phosphate
  modified_base 3: mod_base = OTHER; note = 2'-O-methyl-uridine-3'-phosphate
  modified_base 4: mod_base = OTHER; note = 2'-O-methyl-guanosine-3'-phosphate
  modified_base 5: mod_base = OTHER; note = 2'-fluoro-adenosine-3'-phosphate
  modified_base 6: mod_base = OTHER; note = 2'-fluoro-guanosine-3'-phosphate
  modified_base 7: mod_base = OTHER; note = 2'-fluoro-adenosine-3'-phosphate
  modified_base 8: mod_base = OTHER; note = 2'-fluoro-cytidine-3'-phosphate
  modified_base 9: mod_base = OTHER; note = 2'-fluoro-uridine-3'-phosphate
  modified_base 10: mod_base = OTHER; note = 2'-fluoro-cytidine-3'-phosphate
  modified_base 11: mod_base = OTHER; note = 2'-O-methyl-uridine-3'-phosphate
  modified_base 12: mod_base = OTHER; note = 2'-O-methyl-guanosine-3'-phosphate
  modified_base 13: mod_base = OTHER; note = 2'-O-methyl-guanosine-3'-phosphate
  modified_base 14: mod_base = OTHER; note = 2'-O-methyl-cytidine-3'-phosphate
  modified_base 15: mod_base = OTHER; note = 2'-O-methyl-uridine-3'-phosphate
  modified_base 16: mod_base = OTHER; note = 2'-O-methyl-uridine-3'-phosphate
  modified_base 17: mod_base = OTHER; note = 2'-O-methyl-adenosine-3'-phosphate
  modified_base 18: mod_base = OTHER; note = 2'-O-methyl-uridine-3'-phosphate
  modified_base 19: mod_base = OTHER; note = 2'-O-methyl-uridine-3'-phosphate
tctgagactctggcttatt

SEQ ID NO: 628 - RNA, 21 nt, synthetic construct
  source 1..21: mol_type = other RNA
aataagccagagtctcagaca

SEQ ID NO: 629 - RNA, 19 nt, synthetic construct
  source 1..19: mol_type = other RNA
gtgaagagaccaagatgaa

SEQ ID NO: 630 - RNA, 21 nt, synthetic construct
  source 1..21: mol_type = other RNA
  modified_base 1: mod_base = OTHER; note = 2'-O-methyl-uridine-3'-phosphate
  modified_base 2: mod_base = OTHER; note = 2'-fluoro-uridine-3'-phosphate
  modified_base 3: mod_base = OTHER; note = 2'-O-methyl-cytidine-3'-phosphate
  modified_base 4: mod_base = OTHER; note = 2'-fluoro-adenosine-3'-phosphate
  modified_base 5: mod_base = OTHER; note = 2'-O-methyl-uridine-3'-phosphate
  modified_base 6: mod_base = OTHER; note = 2'-fluoro-cytidine-3'-phosphate
  modified_base 7: mod_base = OTHER; note = 2'-O-methyl-uridine-3'-phosphate
  modified_base 8: mod_base = OTHER; note = 2'-fluoro-uridine-3'-phosphate
  modified_base 9: mod_base = OTHER; note = 2'-O-methyl-guanosine-3'-phosphate
  modified_base 10: mod_base = OTHER; note = 2'-O-methyl-guanosine-3'-phosphate
  modified_base 11: mod_base = OTHER; note = 2'-O-methyl-uridine-3'-phosphate
  modified_base 12: mod_base = OTHER; note = 2'-fluoro-cytidine-3'-phosphate
  modified_base 13: mod_base = OTHER; note = 2'-O-methyl-uridine-3'-phosphate
  modified_base 14: mod_base = OTHER; note = 2'-fluoro-cytidine-3'-phosphate
  modified_base 15: mod_base = OTHER; note = 2'-O-methyl-uridine-3'-phosphate
  modified_base 16: mod_base = OTHER; note = 2'-fluoro-uridine-3'-phosphate
  modified_base 17: mod_base = OTHER; note = 2'-O-methyl-cytidine-3'-phosphate
  modified_base 18: mod_base = OTHER; note = 2'-fluoro-adenosine-3'-phosphate
  modified_base 19: mod_base = OTHER; note = 2'-O-methyl-cytidine-3'-phosphate
  modified_base 20: mod_base = OTHER; note = 2'-O-methyl-uridine-3'-phosphate
  modified_base 21: mod_base = OTHER; note = 2'-O-methyl-cytidine-3'-phosphate
ttcatcttggtctcttcactc

SEQ ID NO: 631 - RNA, 19 nt, synthetic construct
  source 1..19: mol_type = other RNA
gtgaagagaccaagatgaa

SEQ ID NO: 632 - RNA, 21 nt, synthetic construct
  source 1..21: mol_type = other RNA
  modified_base 1: mod_base = OTHER; note = 2'-O-methyl-uridine-3'-phosphate
  modified_base 2: mod_base = OTHER; note = 2'-fluoro-uridine-3'-phosphate
  modified_base 3: mod_base = OTHER; note = 2'-O-methyl-cytidine-3'-phosphate
  modified_base 4: mod_base = OTHER; note = 2'-fluoro-adenosine-3'-phosphate
  modified_base 5: mod_base = OTHER; note = 2'-O-methyl-uridine-3'-phosphate
  modified_base 6: mod_base = OTHER; note = 2'-fluoro-cytidine-3'-phosphate
  modified_base 7: mod_base = OTHER; note = 2'-O-methyl-uridine-3'-phosphate
  modified_base 8: mod_base = OTHER; note = 2'-fluoro-uridine-3'-phosphate
  modified_base 9: mod_base = OTHER; note = 2'-fluoro-guanosine-3'-phosphate
  modified_base 10: mod_base = OTHER; note = 2'-O-methyl-guanosine-3'-phosphate
  modified_base 11: mod_base = OTHER; note = 2'-O-methyl-uridine-3'-phosphate
  modified_base 12: mod_base = OTHER; note = 2'-fluoro-cytidine-3'-phosphate
  modified_base 13: mod_base = OTHER; note = 2'-O-methyl-uridine-3'-phosphate
  modified_base 14: mod_base = OTHER; note = 2'-fluoro-cytidine-3'-phosphate
  modified_base 15: mod_base = OTHER; note = 2'-O-methyl-uridine-3'-phosphate
  modified_base 16: mod_base = OTHER; note = 2'-fluoro-uridine-3'-phosphate
  modified_base 17: mod_base = OTHER; note = 2'-O-methyl-cytidine-3'-phosphate
  modified_base 18: mod_base = OTHER; note = 2'-fluoro-adenosine-3'-phosphate
  modified_base 19: mod_base = OTHER; note = 2'-O-methyl-cytidine-3'-phosphate
  modified_base 20: mod_base = OTHER; note = 2'-O-methyl-uridine-3'-phosphate
  modified_base 21: mod_base = OTHER; note = 2'-O-methyl-cytidine-3'-phosphate
ttcatcttggtctcttcactc

SEQ ID NO: 633 - RNA, 19 nt, synthetic construct
  source 1..19: mol_type = other RNA
gtgaagagaccaagatgaa

SEQ ID NO: 634 - RNA, 21 nt, synthetic construct
  source 1..21: mol_type = other RNA
  modified_base 1: mod_base = OTHER; note = 2'-O-methyl-uridine-3'-phosphate
  modified_base 2: mod_base = OTHER; note = 2'-fluoro-uridine-3'-phosphate
  modified_base 3: mod_base = OTHER; note = 2'-O-methyl-cytidine-3'-phosphate
  modified_base 4: mod_base = OTHER; note = 2'-fluoro-adenosine-3'-phosphate
  modified_base 5: mod_base = OTHER; note = 2'-O-methyl-uridine-3'-phosphate
  modified_base 6: mod_base = OTHER; note = 2'-fluoro-cytidine-3'-phosphate
  modified_base 7: mod_base = OTHER; note = 2'-O-methyl-uridine-3'-phosphate
  modified_base 8: mod_base = OTHER; note = 2'-fluoro-uridine-3'-phosphate
  modified_base 9: mod_base = OTHER; note = 2'-O-methyl-guanosine-3'-phosphate
  modified_base 10: mod_base = OTHER; note = 2'-fluoro-guanosine-3'-phosphate
  modified_base 11: mod_base = OTHER; note = 2'-O-methyl-uridine-3'-phosphate
  modified_base 12: mod_base = OTHER; note = 2'-fluoro-cytidine-3'-phosphate
  modified_base 13: mod_base = OTHER; note = 2'-O-methyl-uridine-3'-phosphate
  modified_base 14: mod_base = OTHER; note = 2'-fluoro-cytidine-3'-phosphate
  modified_base 15: mod_base = OTHER; note = 2'-O-methyl-uridine-3'-phosphate
  modified_base 16: mod_base = OTHER; note = 2'-fluoro-uridine-3'-phosphate
  modified_base 17: mod_base = OTHER; note = 2'-O-methyl-cytidine-3'-phosphate
  modified_base 18: mod_base = OTHER; note = 2'-fluoro-adenosine-3'-phosphate
  modified_base 19: mod_base = OTHER; note = 2'-O-methyl-cytidine-3'-phosphate
  modified_base 20: mod_base = OTHER; note = 2'-O-methyl-uridine-3'-phosphate
  modified_base 21: mod_base = OTHER; note = 2'-O-methyl-cytidine-3'-phosphate
ttcatcttggtctcttcactc

SEQ ID NO: 635 - RNA, 19 nt, synthetic construct
  source 1..19: mol_type = other RNA
gtgaagagaccaagatgaa

SEQ ID NO: 636 - RNA, 21 nt, synthetic construct
  source 1..21: mol_type = other RNA
  modified_base 1: mod_base = OTHER; note = 2'-O-methyl-uridine-3'-phosphate
  modified_base 2: mod_base = OTHER; note = 2'-fluoro-uridine-3'-phosphate
  modified_base 3: mod_base = OTHER; note = 2'-O-methyl-cytidine-3'-phosphate
  modified_base 4: mod_base = OTHER; note = 2'-fluoro-adenosine-3'-phosphate
  modified_base 5: mod_base = OTHER; note = 2'-O-methyl-uridine-3'-phosphate
  modified_base 6: mod_base = OTHER; note = 2'-fluoro-cytidine-3'-phosphate
  modified_base 7: mod_base = OTHER; note = 2'-O-methyl-uridine-3'-phosphate
  modified_base 8: mod_base = OTHER; note = 2'-fluoro-uridine-3'-phosphate
  modified_base 9: mod_base = OTHER; note = 2'-O-methyl-guanosine-3'-phosphate
  modified_base 10: mod_base = OTHER; note = 2'-O-methyl-guanosine-3'-phosphate
  modified_base 11: mod_base = OTHER; note = 2'-fluoro-uridine-3'-phosphate
  modified_base 12: mod_base = OTHER; note = 2'-fluoro-cytidine-3'-phosphate
  modified_base 13: mod_base = OTHER; note = 2'-O-methyl-uridine-3'-phosphate
  modified_base 14: mod_base = OTHER; note = 2'-fluoro-cytidine-3'-phosphate
  modified_base 15: mod_base = OTHER; note = 2'-O-methyl-uridine-3'-phosphate
  modified_base 16: mod_base = OTHER; note = 2'-fluoro-uridine-3'-phosphate
  modified_base 17: mod_base = OTHER; note = 2'-O-methyl-cytidine-3'-phosphate
  modified_base 18: mod_base = OTHER; note = 2'-fluoro-adenosine-3'-phosphate
  modified_base 19: mod_base = OTHER; note = 2'-O-methyl-cytidine-3'-phosphate
  modified_base 20: mod_base = OTHER; note = 2'-O-methyl-uridine-3'-phosphate
  modified_base 21: mod_base = OTHER; note = 2'-O-methyl-cytidine-3'-phosphate
ttcatcttggtctcttcactc

SEQ ID NO: 637 - RNA, 19 nt, synthetic construct
  source 1..19: mol_type = other RNA
gtgaagagaccaagatgaa

SEQ ID NO: 638 - RNA, 21 nt, synthetic construct
  source 1..21: mol_type = other RNA
  modified_base 1: mod_base = OTHER; note = 2'-O-methyl-uridine-3'-phosphate
  modified_base 2: mod_base = OTHER; note = 2'-O-methyl-uridine-3'-phosphate
  modified_base 3: mod_base = OTHER; note = 2'-O-methyl-cytidine-3'-phosphate
  modified_base 4: mod_base = OTHER; note = 2'-fluoro-adenosine-3'-phosphate
  modified_base 5: mod_base = OTHER; note = 2'-O-methyl-uridine-3'-phosphate
  modified_base 6: mod_base = OTHER; note = 2'-fluoro-cytidine-3'-phosphate
  modified_base 7: mod_base = OTHER; note = 2'-O-methyl-uridine-3'-phosphate
  modified_base 8: mod_base = OTHER; note = 2'-fluoro-uridine-3'-phosphate
  modified_base 9: mod_base = OTHER; note = 2'-O-methyl-guanosine-3'-phosphate
  modified_base 10: mod_base = OTHER; note = 2'-O-methyl-guanosine-3'-phosphate
  modified_base 11: mod_base = OTHER; note = 2'-O-methyl-uridine-3'-phosphate
  modified_base 12: mod_base = OTHER; note = 2'-fluoro-cytidine-3'-phosphate
  modified_base 13: mod_base = OTHER; note = 2'-O-methyl-uridine-3'-phosphate
  modified_base 14: mod_base = OTHER; note = 2'-fluoro-cytidine-3'-phosphate
  modified_base 15: mod_base = OTHER; note = 2'-O-methyl-uridine-3'-phosphate
  modified_base 16: mod_base = OTHER; note = 2'-fluoro-uridine-3'-phosphate
  modified_base 17: mod_base = OTHER; note = 2'-O-methyl-cytidine-3'-phosphate
  modified_base 18: mod_base = OTHER; note = 2'-fluoro-adenosine-3'-phosphate
  modified_base 19: mod_base = OTHER; note = 2'-O-methyl-cytidine-3'-phosphate
  modified_base 20: mod_base = OTHER; note = 2'-O-methyl-uridine-3'-phosphate
  modified_base 21: mod_base = OTHER; note = 2'-O-methyl-cytidine-3'-phosphate
ttcatcttggtctcttcactc

SEQ ID NO: 639 - RNA, 19 nt, synthetic construct
  source 1..19: mol_type = other RNA
gtgaagagaccaagatgaa

SEQ ID NO: 640 - RNA, 21 nt, synthetic construct
  source 1..21: mol_type = other RNA
  modified_base 1: mod_base = OTHER; note = 2'-O-methyl-uridine-3'-phosphate
  modified_base 2: mod_base = OTHER; note = 2'-fluoro-uridine-3'-phosphate
  modified_base 3: mod_base = OTHER; note = 2'-O-methyl-cytidine-3'-phosphate
  modified_base 4: mod_base = OTHER; note = 2'-O-methyl-adenosine-3'-phosphate
  modified_base 5: mod_base = OTHER; note = 2'-O-methyl-uridine-3'-phosphate
  modified_base 6: mod_base = OTHER; note = 2'-fluoro-cytidine-3'-phosphate
  modified_base 7: mod_base = OTHER; note = 2'-O-methyl-uridine-3'-phosphate
  modified_base 8: mod_base = OTHER; note = 2'-fluoro-uridine-3'-phosphate
  modified_base 9: mod_base = OTHER; note = 2'-O-methyl-guanosine-3'-phosphate
  modified_base 10: mod_base = OTHER; note = 2'-O-methyl-guanosine-3'-phosphate
  modified_base 11: mod_base = OTHER; note = 2'-O-methyl-uridine-3'-phosphate
  modified_base 12: mod_base = OTHER; note = 2'-fluoro-cytidine-3'-phosphate
  modified_base 13: mod_base = OTHER; note = 2'-O-methyl-uridine-3'-phosphate
  modified_base 14: mod_base = OTHER; note = 2'-fluoro-cytidine-3'-phosphate
  modified_base 15: mod_base = OTHER; note = 2'-O-methyl-uridine-3'-phosphate
  modified_base 16: mod_base = OTHER; note = 2'-fluoro-uridine-3'-phosphate
  modified_base 17: mod_base = OTHER; note = 2'-O-methyl-cytidine-3'-phosphate
  modified_base 18: mod_base = OTHER; note = 2'-fluoro-adenosine-3'-phosphate
  modified_base 19: mod_base = OTHER; note = 2'-O-methyl-cytidine-3'-phosphate
  modified_base 20: mod_base = OTHER; note = 2'-O-methyl-uridine-3'-phosphate
  modified_base 21: mod_base = OTHER; note = 2'-O-methyl-cytidine-3'-phosphate
ttcatcttggtctcttcactc

SEQ ID NO: 641 - RNA, 19 nt, synthetic construct
  source 1..19: mol_type = other RNA
gtgaagagaccaagatgaa

SEQ ID NO: 642 - RNA, 21 nt, synthetic construct
  source 1..21: mol_type = other RNA
  modified_base 1: mod_base = OTHER; note = 2'-O-methyl-uridine-3'-phosphate
  modified_base 2: mod_base = OTHER; note = 2'-fluoro-uridine-3'-phosphate
  modified_base 3: mod_base = OTHER; note = 2'-O-methyl-cytidine-3'-phosphate
  modified_base 4: mod_base = OTHER; note = 2'-fluoro-adenosine-3'-phosphate
  modified_base 5: mod_base = OTHER; note = 2'-O-methyl-uridine-3'-phosphate
  modified_base 6: mod_base = OTHER; note = 2'-O-methyl-cytidine-3'-phosphate
  modified_base 7: mod_base = OTHER; note = 2'-O-methyl-uridine-3'-phosphate
  modified_base 8: mod_base = OTHER; note = 2'-fluoro-uridine-3'-phosphate
  modified_base 9: mod_base = OTHER; note = 2'-O-methyl-guanosine-3'-phosphate
  modified_base 10: mod_base = OTHER; note = 2'-O-methyl-guanosine-3'-phosphate
  modified_base 11: mod_base = OTHER; note = 2'-O-methyl-uridine-3'-phosphate
  modified_base 12: mod_base = OTHER; note = 2'-fluoro-cytidine-3'-phosphate
  modified_base 13: mod_base = OTHER; note = 2'-O-methyl-uridine-3'-phosphate
  modified_base 14: mod_base = OTHER; note = 2'-fluoro-cytidine-3'-phosphate
  modified_base 15: mod_base = OTHER; note = 2'-O-methyl-uridine-3'-phosphate
  modified_base 16: mod_base = OTHER; note = 2'-fluoro-uridine-3'-phosphate
  modified_base 17: mod_base = OTHER; note = 2'-O-methyl-cytidine-3'-phosphate
  modified_base 18: mod_base = OTHER; note = 2'-fluoro-adenosine-3'-phosphate
  modified_base 19: mod_base = OTHER; note = 2'-O-methyl-cytidine-3'-phosphate
  modified_base 20: mod_base = OTHER; note = 2'-O-methyl-uridine-3'-phosphate
  modified_base 21: mod_base = OTHER; note = 2'-O-methyl-cytidine-3'-phosphate
ttcatcttggtctcttcactc

SEQ ID NO: 643 - RNA, 19 nt, synthetic construct
  source 1..19: mol_type = other RNA
gtgaagagaccaagatgaa

SEQ ID NO: 644 - RNA, 21 nt, synthetic construct
  source 1..21: mol_type = other RNA
  modified_base 1: mod_base = OTHER; note = 2'-O-methyl-uridine-3'-phosphate
  modified_base 2: mod_base = OTHER; note = 2'-fluoro-uridine-3'-phosphate
  modified_base 3: mod_base = OTHER; note = 2'-O-methyl-cytidine-3'-phosphate
  modified_base 4: mod_base = OTHER; note = 2'-fluoro-adenosine-3'-phosphate
  modified_base 5: mod_base = OTHER; note = 2'-O-methyl-uridine-3'-phosphate
  modified_base 6: mod_base = OTHER; note = 2'-fluoro-cytidine-3'-phosphate
  modified_base 7: mod_base = OTHER; note = 2'-O-methyl-uridine-3'-phosphate
  modified_base 8: mod_base = OTHER; note = 2'-O-methyl-uridine-3'-phosphate
  modified_base 9: mod_base = OTHER; note = 2'-O-methyl-guanosine-3'-phosphate
  modified_base 10: mod_base = OTHER; note = 2'-O-methyl-guanosine-3'-phosphate
  modified_base 11: mod_base = OTHER; note = 2'-O-methyl-uridine-3'-phosphate
  modified_base 12: mod_base = OTHER; note = 2'-fluoro-cytidine-3'-phosphate
  modified_base 13: mod_base = OTHER; note = 2'-O-methyl-uridine-3'-phosphate
  modified_base 14: mod_base = OTHER; note = 2'-fluoro-cytidine-3'-phosphate
  modified_base 15: mod_base = OTHER; note = 2'-O-methyl-uridine-3'-phosphate
  modified_base 16: mod_base = OTHER; note = 2'-fluoro-uridine-3'-phosphate
  modified_base 17: mod_base = OTHER; note = 2'-O-methyl-cytidine-3'-phosphate
  modified_base 18: mod_base = OTHER; note = 2'-fluoro-adenosine-3'-phosphate
  modified_base 19: mod_base = OTHER; note = 2'-O-methyl-cytidine-3'-phosphate
  modified_base 20: mod_base = OTHER; note = 2'-O-methyl-uridine-3'-phosphate
  modified_base 21: mod_base = OTHER; note = 2'-O-methyl-cytidine-3'-phosphate
ttcatcttggtctcttcactc

SEQ ID NO: 645 - RNA, 19 nt, synthetic construct
  source 1..19: mol_type = other RNA
gtgaagagaccaagatgaa

SEQ ID NO: 646 - RNA, 21 nt, synthetic construct
  source 1..21: mol_type = other RNA
  modified_base 1: mod_base = OTHER; note = 2'-O-methyl-uridine-3'-phosphate
  modified_base 2: mod_base = OTHER; note = 2'-fluoro-uridine-3'-phosphate
  modified_base 3: mod_base = OTHER; note = 2'-O-methyl-cytidine-3'-phosphate
  modified_base 4: mod_base = OTHER; note = 2'-fluoro-adenosine-3'-phosphate
  modified_base 5: mod_base = OTHER; note = 2'-O-methyl-uridine-3'-phosphate
  modified_base 6: mod_base = OTHER; note = 2'-fluoro-cytidine-3'-phosphate
  modified_base 7: mod_base = OTHER; note = 2'-O-methyl-uridine-3'-phosphate
  modified_base 8: mod_base = OTHER; note = 2'-fluoro-uridine-3'-phosphate
  modified_base 9: mod_base = OTHER; note = 2'-O-methyl-guanosine-3'-phosphate
  modified_base 10: mod_base = OTHER; note = 2'-O-methyl-guanosine-3'-phosphate
  modified_base 11: mod_base = OTHER; note = 2'-O-methyl-uridine-3'-phosphate
  modified_base 12: mod_base = OTHER; note = 2'-O-methyl-cytidine-3'-phosphate
  modified_base 13: mod_base = OTHER; note = 2'-O-methyl-uridine-3'-phosphate
  modified_base 14: mod_base = OTHER; note = 2'-fluoro-cytidine-3'-phosphate
  modified_base 15: mod_base = OTHER; note = 2'-O-methyl-uridine-3'-phosphate
  modified_base 16: mod_base = OTHER; note = 2'-fluoro-uridine-3'-phosphate
  modified_base 17: mod_base = OTHER; note = 2'-O-methyl-cytidine-3'-phosphate
  modified_base 18: mod_base = OTHER; note = 2'-fluoro-adenosine-3'-phosphate
  modified_base 19: mod_base = OTHER; note = 2'-O-methyl-cytidine-3'-phosphate
  modified_base 20: mod_base = OTHER; note = 2'-O-methyl-uridine-3'-phosphate
  modified_base 21: mod_base = OTHER; note = 2'-O-methyl-cytidine-3'-phosphate
ttcatcttggtctcttcactc

SEQ ID NO: 647 - RNA, 19 nt, synthetic construct
  source 1..19: mol_type = other RNA
gtgaagagaccaagatgaa

SEQ ID NO: 648 - RNA, 21 nt, synthetic construct
  source 1..21: mol_type = other RNA
  modified_base 1: mod_base = OTHER; note = 2'-O-methyl-uridine-3'-phosphate
  modified_base 2: mod_base = OTHER; note = 2'-fluoro-uridine-3'-phosphate
  modified_base 3: mod_base = OTHER; note = 2'-O-methyl-cytidine-3'-phosphate
  modified_base 4: mod_base = OTHER; note = 2'-fluoro-adenosine-3'-phosphate
  modified_base 5: mod_base = OTHER; note = 2'-O-methyl-uridine-3'-phosphate
  modified_base 6: mod_base = OTHER; note = 2'-fluoro-cytidine-3'-phosphate
  modified_base 7: mod_base = OTHER; note = 2'-O-methyl-uridine-3'-phosphate
  modified_base 8: mod_base = OTHER; note = 2'-fluoro-uridine-3'-phosphate
  modified_base 9: mod_base = OTHER; note = 2'-O-methyl-guanosine-3'-phosphate
  modified_base 10: mod_base = OTHER; note = 2'-O-methyl-guanosine-3'-phosphate
  modified_base 11: mod_base = OTHER; note = 2'-O-methyl-uridine-3'-phosphate
  modified_base 12: mod_base = OTHER; note = 2'-fluoro-cytidine-3'-phosphate
  modified_base 13: mod_base = OTHER; note = 2'-O-methyl-uridine-3'-phosphate
  modified_base 14: mod_base = OTHER; note = 2'-O-methyl-cytidine-3'-phosphate
  modified_base 15: mod_base = OTHER; note = 2'-O-methyl-uridine-3'-phosphate
  modified_base 16: mod_base = OTHER; note = 2'-fluoro-uridine-3'-phosphate
  modified_base 17: mod_base = OTHER; note = 2'-O-methyl-cytidine-3'-phosphate
  modified_base 18: mod_base = OTHER; note = 2'-fluoro-adenosine-3'-phosphate
  modified_base 19: mod_base = OTHER; note = 2'-O-methyl-cytidine-3'-phosphate
  modified_base 20: mod_base = OTHER; note = 2'-O-methyl-uridine-3'-phosphate
  modified_base 21: mod_base = OTHER; note = 2'-O-methyl-cytidine-3'-phosphate
ttcatcttggtctcttcactc

SEQ ID NO: 649 - RNA, 19 nt, synthetic construct
  source 1..19: mol_type = other RNA
gtgaagagaccaagatgaa

SEQ ID NO: 650 - RNA, 21 nt, synthetic construct
  source 1..21: mol_type = other RNA
  modified_base 1: mod_base = OTHER; note = 2'-O-methyl-uridine-3'-phosphate
  modified_base 2: mod_base = OTHER; note = 2'-fluoro-uridine-3'-phosphate
  modified_base 3: mod_base = OTHER; note = 2'-O-methyl-cytidine-3'-phosphate
  modified_base 4: mod_base = OTHER; note = 2'-fluoro-adenosine-3'-phosphate
  modified_base 5: mod_base = OTHER; note = 2'-O-methyl-uridine-3'-phosphate
  modified_base 6: mod_base = OTHER; note = 2'-fluoro-cytidine-3'-phosphate
  modified_base 7: mod_base = OTHER; note = 2'-O-methyl-uridine-3'-phosphate
  modified_base 8: mod_base = OTHER; note = 2'-fluoro-uridine-3'-phosphate
  modified_base 9: mod_base = OTHER; note = 2'-O-methyl-guanosine-3'-phosphate
  modified_base 10: mod_base = OTHER; note = 2'-O-methyl-guanosine-3'-phosphate
  modified_base 11: mod_base = OTHER; note = 2'-O-methyl-uridine-3'-phosphate
  modified_base 12: mod_base = OTHER; note = 2'-fluoro-cytidine-3'-phosphate
  modified_base 13: mod_base = OTHER; note = 2'-O-methyl-uridine-3'-phosphate
  modified_base 14: mod_base = OTHER; note = 2'-fluoro-cytidine-3'-phosphate
  modified_base 15: mod_base = OTHER; note = 2'-O-methyl-uridine-3'-phosphate
  modified_base 16: mod_base = OTHER; note = 2'-O-methyl-uridine-3'-phosphate
  modified_base 17: mod_base = OTHER; note = 2'-O-methyl-cytidine-3'-phosphate
  modified_base 18: mod_base = OTHER; note = 2'-fluoro-adenosine-3'-phosphate
  modified_base 19: mod_base = OTHER; note = 2'-O-methyl-cytidine-3'-phosphate
  modified_base 20: mod_base = OTHER; note = 2'-O-methyl-uridine-3'-phosphate
  modified_base 21: mod_base = OTHER; note = 2'-O-methyl-cytidine-3'-phosphate
ttcatcttggtctcttcactc

SEQ ID NO: 651 - RNA, 19 nt, synthetic construct
  source 1..19: mol_type = other RNA
gtgaagagaccaagatgaa

SEQ ID NO: 652 - RNA, 21 nt, synthetic construct
  source 1..21: mol_type = other RNA
  modified_base 1: mod_base = OTHER; note = 2'-O-methyl-uridine-3'-phosphate
  modified_base 2: mod_base = OTHER; note = 2'-fluoro-uridine-3'-phosphate
  modified_base 3: mod_base = OTHER; note = 2'-O-methyl-cytidine-3'-phosphate
  modified_base 4: mod_base = OTHER; note = 2'-fluoro-adenosine-3'-phosphate
  modified_base 5: mod_base = OTHER; note = 2'-O-methyl-uridine-3'-phosphate
  modified_base 6: mod_base = OTHER; note = 2'-fluoro-cytidine-3'-phosphate
  modified_base 7: mod_base = OTHER; note = 2'-O-methyl-uridine-3'-phosphate
  modified_base 8: mod_base = OTHER; note = 2'-fluoro-uridine-3'-phosphate
  modified_base 9: mod_base = OTHER; note = 2'-O-methyl-guanosine-3'-phosphate
  modified_base 10: mod_base = OTHER; note = 2'-O-methyl-guanosine-3'-phosphate
  modified_base 11: mod_base = OTHER; note = 2'-O-methyl-uridine-3'-phosphate
  modified_base 12: mod_base = OTHER; note = 2'-fluoro-cytidine-3'-phosphate
  modified_base 13: mod_base = OTHER; note = 2'-O-methyl-uridine-3'-phosphate
  modified_base 14: mod_base = OTHER; note = 2'-fluoro-cytidine-3'-phosphate
  modified_base 15: mod_base = OTHER; note = 2'-O-methyl-uridine-3'-phosphate
  modified_base 16: mod_base = OTHER; note = 2'-fluoro-uridine-3'-phosphate
  modified_base 17: mod_base = OTHER; note = 2'-O-methyl-cytidine-3'-phosphate
  modified_base 18: mod_base = OTHER; note = 2'-O-methyl-adenosine-3'-phosphate
  modified_base 19: mod_base = OTHER; note = 2'-O-methyl-cytidine-3'-phosphate
  modified_base 20: mod_base = OTHER; note = 2'-O-methyl-uridine-3'-phosphate
  modified_base 21: mod_base = OTHER; note = 2'-O-methyl-cytidine-3'-phosphate
ttcatcttggtctcttcactc

SEQ ID NO: 653 - RNA, 19 nt, synthetic construct
  source 1..19: mol_type = other RNA
gtgaagagaccaagatgaa

SEQ ID NO: 654 - RNA, 21 nt, synthetic construct
  source 1..21: mol_type = other RNA
  modified_base 1: mod_base = OTHER; note = 2'-O-methyl-uridine-3'-thiophosphate-phosphate
  modified_base 2: mod_base = OTHER; note = 2'-fluoro-uridine-3'-phosphate
  modified_base 3: mod_base = OTHER; note = 2'-O-methyl-cytidine-3'-phosphate
  modified_base 4: mod_base = OTHER; note = 2'-fluoro-adenosine-3'-phosphate
  modified_base 5: mod_base = OTHER; note = 2'-O-methyl-uridine-3'-phosphate
  modified_base 6: mod_base = OTHER; note = 2'-fluoro-cytidine-3'-phosphate
  modified_base 7: mod_base = OTHER; note = 2'-O-methyl-uridine-3'-phosphate
  modified_base 8: mod_base = OTHER; note = 2'-fluoro-uridine-3'-phosphate
  modified_base 9: mod_base = OTHER; note = 2'-O-methyl-guanosine-3'-phosphate
  modified_base 10: mod_base = OTHER; note = 2'-O-methyl-guanosine-3'-phosphate
  modified_base 11: mod_base = OTHER; note = 2'-O-methyl-uridine-3'-phosphate
  modified_base 12: mod_base = OTHER; note = 2'-fluoro-cytidine-3'-phosphate
  modified_base 13: mod_base = OTHER; note = 2'-O-methyl-uridine-3'-phosphate
  modified_base 14: mod_base = OTHER; note = 2'-fluoro-cytidine-3'-phosphate
  modified_base 15: mod_base = OTHER; note = 2'-O-methyl-uridine-3'-phosphate
  modified_base 16: mod_base = OTHER; note = 2'-fluoro-uridine-3'-phosphate
  modified_base 17: mod_base = OTHER; note = 2'-O-methyl-cytidine-3'-phosphate
  modified_base 18: mod_base = OTHER; note = 2'-fluoro-adenosine-3'-phosphate
  modified_base 19: mod_base = OTHER; note = 2'-O-methyl-cytidine-3'-phosphate
  modified_base 20: mod_base = OTHER; note = 2'-O-methyl-uridine-3'-thiophosphate-phosphate
  modified_base 21: mod_base = OTHER; note = 2'-O-methyl-cytidine-3'-phosphate
ttcatcttggtctcttcactc

SEQ ID NO: 655 - RNA, 19 nt, synthetic construct
  source 1..19: mol_type = other RNA
gtgaagagaccaagatgaa

SEQ ID NO: 656 - RNA, 21 nt, synthetic construct
  source 1..21: mol_type = other RNA
  modified_base 1: mod_base = OTHER; note = 2'-O-methyl-uridine-3'-thiophosphate-phosphate
  modified_base 2: mod_base = OTHER; note = 2'-fluoro-uridine-3'-thiophosphate-phosphate
  modified_base 3: mod_base = OTHER; note = 2'-O-methyl-cytidine-3'-phosphate
  modified_base 4: mod_base = OTHER; note = 2'-fluoro-adenosine-3'-phosphate
  modified_base 5: mod_base = OTHER; note = 2'-O-methyl-uridine-3'-phosphate
  modified_base 6: mod_base = OTHER; note = 2'-fluoro-cytidine-3'-phosphate
  modified_base 7: mod_base = OTHER; note = 2'-O-methyl-uridine-3'-phosphate
  modified_base 8: mod_base = OTHER; note = 2'-fluoro-uridine-3'-phosphate
  modified_base 9: mod_base = OTHER; note = 2'-O-methyl-guanosine-3'-phosphate
  modified_base 10: mod_base = OTHER; note = 2'-O-methyl-guanosine-3'-phosphate
  modified_base 11: mod_base = OTHER; note = 2'-O-methyl-uridine-3'-phosphate
  modified_base 12: mod_base = OTHER; note = 2'-fluoro-cytidine-3'-phosphate
  modified_base 13: mod_base = OTHER; note = 2'-O-methyl-uridine-3'-phosphate
  modified_base 14: mod_base = OTHER; note = 2'-fluoro-cytidine-3'-phosphate
  modified_base 15: mod_base = OTHER; note = 2'-O-methyl-uridine-3'-phosphate
  modified_base 16: mod_base = OTHER; note = 2'-fluoro-uridine-3'-phosphate
  modified_base 17: mod_base = OTHER; note = 2'-O-methyl-cytidine-3'-phosphate
  modified_base 18: mod_base = OTHER; note = 2'-fluoro-adenosine-3'-phosphate
  modified_base 19: mod_base = OTHER; note = 2'-O-methyl-cytidine-3'-thiophosphate-phosphate
  modified_base 20: mod_base = OTHER; note = 2'-O-methyl-uridine-3'-thiophosphate-phosphate
  modified_base 21: mod_base = OTHER; note = 2'-O-methyl-cytidine-3'-phosphate
ttcatcttggtctcttcactc

SEQ ID NO: 657 - RNA, 19 nt, synthetic construct
  source 1..19: mol_type = other RNA
gtgaagagaccaagatgaa

SEQ ID NO: 658 - RNA, 21 nt, synthetic construct
  source 1..21: mol_type = other RNA
  modified_base 1: mod_base = OTHER; note = 2'-O-methyl-uridine-3'-phosphate
  modified_base 2: mod_base = OTHER; note = 2'-deoxy-uridine-3'-phosphate
  modified_base 3: mod_base = OTHER; note = 2'-O-methyl-cytidine-3'-phosphate
  modified_base 4: mod_base = OTHER; note = 2'-fluoro-adenosine-3'-phosphate
  modified_base 5: mod_base = OTHER; note = 2'-deoxy-uridine-3'-phosphate
  modified_base 6: mod_base = OTHER; note = 2'-fluoro-cytidine-3'-phosphate
  modified_base 7: mod_base = OTHER; note = 2'-deoxy-uridine-3'-phosphate
  modified_base 8: mod_base = OTHER; note = 2'-fluoro-uridine-3'-phosphate
  modified_base 9: mod_base = OTHER; note = 2'-O-methyl-guanosine-3'-phosphate
  modified_base 10: mod_base = OTHER; note = 2'-O-methyl-guanosine-3'-phosphate
  modified_base 11: mod_base = OTHER; note = 2'-O-methyl-uridine-3'-phosphate
  modified_base 12: mod_base = OTHER; note = 2'-deoxy-cytidine-3'-phosphate
  modified_base 13: mod_base = OTHER; note = 2'-O-methyl-uridine-3'-phosphate
  modified_base 14: mod_base = OTHER; note = 2'-fluoro-cytidine-3'-phosphate
  modified_base 15: mod_base = OTHER; note = 2'-O-methyl-uridine-3'-phosphate
  modified_base 16: mod_base = OTHER; note = 2'-fluoro-uridine-3'-phosphate
  modified_base 17: mod_base = OTHER; note = 2'-O-methyl-cytidine-3'-phosphate
  modified_base 18: mod_base = OTHER; note = 2'-fluoro-adenosine-3'-phosphate
  modified_base 19: mod_base = OTHER; note = 2'-O-methyl-cytidine-3'-phosphate
  modified_base 20: mod_base = OTHER; note = 2'-O-methyl-uridine-3'-phosphate
  modified_base 21: mod_base = OTHER; note = 2'-O-methyl-cytidine-3'-phosphate
ttcatcttggtctcttcactc

SEQ ID NO: 659 - RNA, 19 nt, synthetic construct
  source 1..19: mol_type = other RNA
  modified_base 1: mod_base = OTHER; note = 2'-O-methyl-guanosine-3'-phosphate
  modified_base 2: mod_base = OTHER; note = 2'-O-methyl-uridine-3'-phosphate
  modified_base 3: mod_base = OTHER; note = 2'-O-methyl-guanosine-3'-phosphate
  modified_base 4: mod_base = OTHER; note = 2'-O-methyl-adenosine-3'-phosphate
  modified_base 5: mod_base = OTHER; note = 2'-fluoro-adenosine-3'-phosphate
  modified_base 6: mod_base = OTHER; note = 2'-fluoro-guanosine-3'-phosphate
  modified_base 7: mod_base = OTHER; note = 2'-fluoro-adenosine-3'-phosphate
  modified_base 8: mod_base = OTHER; note = 2'-fluoro-guanosine-3'-phosphate
  modified_base 9: mod_base = OTHER; note = 2'-fluoro-adenosine-3'-phosphate
  modified_base 10: mod_base = OTHER; note = 2'-fluoro-cytidine-3'-phosphate
  modified_base 11: mod_base = OTHER; note = 2'-O-methyl-cytidine-3'-phosphate
  modified_base 12: mod_base = OTHER; note = 2'-O-methyl-adenosine-3'-phosphate
  modified_base 13: mod_base = OTHER; note = 2'-O-methyl-adenosine-3'-phosphate
  modified_base 14: mod_base = OTHER; note = 2'-O-methyl-guanosine-3'-phosphate
  modified_base 15: mod_base = OTHER; note = 2'-O-methyl-adenosine-3'-phosphate
  modified_base 16: mod_base = OTHER; note = 2'-O-methyl-uridine-3'-phosphate
  modified_base 17: mod_base = OTHER; note = 2'-O-methyl-guanosine-3'-phosphate
  modified_base 18: mod_base = OTHER; note = 2'-O-methyl-adenosine-3'-phosphate
  modified_base 19: mod_base = OTHER; note = 2'-O-methyl-adenosine-3'-phosphate
gtgaagagaccaagatgaa

SEQ ID NO: 660 - RNA, 21 nt, synthetic construct
  source 1..21: mol_type = other RNA
ttcatcttggtctcttcactt

SEQ ID NO: 661 - RNA, 19 nt, synthetic construct
  source 1..19: mol_type = other RNA
  modified_base 1: mod_base = OTHER; note = 2'-O-methyl-guanosine-3'-phosphate
  modified_base 2: mod_base = OTHER; note = 2'-O-methyl-uridine-3'-phosphate
  modified_base 3: mod_base = OTHER; note = 2'-O-methyl-guanosine-3'-phosphate
  modified_base 4: mod_base = OTHER; note = 2'-O-methyl-adenosine-3'-phosphate
  modified_base 5: mod_base = OTHER; note = 2'-O-methyl-adenosine-3'-phosphate
  modified_base 6: mod_base = OTHER; note = 2'-fluoro-guanosine-3'-phosphate
  modified_base 7: mod_base = OTHER; note = 2'-fluoro-adenosine-3'-phosphate
  modified_base 8: mod_base = OTHER; note = 2'-fluoro-guanosine-3'-phosphate
  modified_base 9: mod_base = OTHER; note = 2'-fluoro-adenosine-3'-phosphate
  modified_base 10: mod_base = OTHER; note = 2'-fluoro-cytidine-3'-phosphate
  modified_base 11: mod_base = OTHER; note = 2'-O-methyl-cytidine-3'-phosphate
  modified_base 12: mod_base = OTHER; note = 2'-O-methyl-adenosine-3'-phosphate
  modified_base 13: mod_base = OTHER; note = 2'-O-methyl-adenosine-3'-phosphate
  modified_base 14: mod_base = OTHER; note = 2'-O-methyl-guanosine-3'-phosphate
  modified_base 15: mod_base = OTHER; note = 2'-O-methyl-adenosine-3'-phosphate
  modified_base 16: mod_base = OTHER; note = 2'-O-methyl-uridine-3'-phosphate
  modified_base 17: mod_base = OTHER; note = 2'-O-methyl-guanosine-3'-phosphate
  modified_base 18: mod_base = OTHER; note = 2'-O-methyl-adenosine-3'-phosphate
  modified_base 19: mod_base = OTHER; note = 2'-O-methyl-adenosine-3'-phosphate
gtgaagagaccaagatgaa

SEQ ID NO: 662 - RNA, 21 nt, synthetic construct
  source 1..21: mol_type = other RNA
ttcatcttggtctcttcactt

SEQ ID NO: 663 - RNA, 19 nt, synthetic construct
  source 1..19: mol_type = other RNA
  modified_base 1: mod_base = OTHER; note = 2'-O-methyl-guanosine-3'-phosphate
  modified_base 2: mod_base = OTHER; note = 2'-O-methyl-uridine-3'-phosphate
  modified_base 3: mod_base = OTHER; note = 2'-O-methyl-guanosine-3'-phosphate
  modified_base 4: mod_base = OTHER; note = 2'-O-methyl-adenosine-3'-phosphate
  modified_base 5: mod_base = OTHER; note = 2'-O-methyl-adenosine-3'-phosphate
  modified_base 6: mod_base = OTHER; note = 2'-O-methyl-guanosine-3'-phosphate
  modified_base 7: mod_base = OTHER; note = 2'-fluoro-adenosine-3'-phosphate
  modified_base 8: mod_base = OTHER; note = 2'-fluoro-guanosine-3'-phosphate
  modified_base 9: mod_base = OTHER; note = 2'-fluoro-adenosine-3'-phosphate
  modified_base 10: mod_base = OTHER; note = 2'-fluoro-cytidine-3'-phosphate
  modified_base 11: mod_base = OTHER; note = 2'-O-methyl-cytidine-3'-phosphate
  modified_base 12: mod_base = OTHER; note = 2'-O-methyl-adenosine-3'-phosphate
  modified_base 13: mod_base = OTHER; note = 2'-O-methyl-adenosine-3'-phosphate
  modified_base 14: mod_base = OTHER; note = 2'-O-methyl-guanosine-3'-phosphate
  modified_base 15: mod_base = OTHER; note = 2'-O-methyl-adenosine-3'-phosphate
  modified_base 16: mod_base = OTHER; note = 2'-O-methyl-uridine-3'-phosphate
  modified_base 17: mod_base = OTHER; note = 2'-O-methyl-guanosine-3'-phosphate
  modified_base 18: mod_base = OTHER; note = 2'-O-methyl-adenosine-3'-phosphate
  modified_base 19: mod_base = OTHER; note = 2'-O-methyl-adenosine-3'-phosphate
gtgaagagaccaagatgaa

SEQ ID NO: 664 - RNA, 21 nt, synthetic construct
  source 1..21: mol_type = other RNA
ttcatcttggtctcttcactt

SEQ ID NO: 665 - RNA, 19 nt, synthetic construct
  source 1..19: mol_type = other RNA
  modified_base 1: mod_base = OTHER; note = 2'-O-methyl-guanosine-3'-phosphate
  modified_base 2: mod_base = OTHER; note = 2'-O-methyl-uridine-3'-phosphate
  modified_base 3: mod_base = OTHER; note = 2'-O-methyl-guanosine-3'-phosphate
  modified_base 4: mod_base = OTHER; note = 2'-O-methyl-adenosine-3'-phosphate
  modified_base 5: mod_base = OTHER; note = 2'-O-methyl-adenosine-3'-phosphate
  modified_base 6: mod_base = OTHER; note = 2'-O-methyl-guanosine-3'-phosphate
  modified_base 7: mod_base = OTHER; note = 2'-O-methyl-adenosine-3'-phosphate
  modified_base 8: mod_base = OTHER; note = 2'-fluoro-guanosine-3'-phosphate
  modified_base 9: mod_base = OTHER; note = 2'-fluoro-adenosine-3'-phosphate
  modified_base 10: mod_base = OTHER; note = 2'-fluoro-cytidine-3'-phosphate
  modified_base 11: mod_base = OTHER; note = 2'-O-methyl-cytidine-3'-phosphate
  modified_base 12: mod_base = OTHER; note = 2'-O-methyl-adenosine-3'-phosphate
  modified_base 13: mod_base = OTHER; note = 2'-O-methyl-adenosine-3'-phosphate
  modified_base 14: mod_base = OTHER; note = 2'-O-methyl-guanosine-3'-phosphate
  modified_base 15: mod_base = OTHER; note = 2'-O-methyl-adenosine-3'-phosphate
  modified_base 16: mod_base = OTHER; note = 2'-O-methyl-uridine-3'-phosphate
  modified_base 17: mod_base = OTHER; note = 2'-O-methyl-guanosine-3'-phosphate
  modified_base 18: mod_base = OTHER; note = 2'-O-methyl-adenosine-3'-phosphate
  modified_base 19: mod_base = OTHER; note = 2'-O-methyl-adenosine-3'-phosphate
gtgaagagaccaagatgaa

SEQ ID NO: 666 - RNA, 21 nt, synthetic construct
  source 1..21: mol_type = other RNA
ttcatcttggtctcttcactt

SEQ ID NO: 667 - RNA, 19 nt, synthetic construct
  source 1..19: mol_type = other RNA
  modified_base 1: mod_base = OTHER; note = 2'-O-methyl-guanosine-3'-phosphate
  modified_base 2: mod_base = OTHER; note = 2'-O-methyl-uridine-3'-phosphate
  modified_base 3: mod_base = OTHER; note = 2'-O-methyl-guanosine-3'-phosphate
  modified_base 4: mod_base = OTHER; note = 2'-O-methyl-adenosine-3'-phosphate
  modified_base 5: mod_base = OTHER; note = 2'-fluoro-adenosine-3'-phosphate
  modified_base 6: mod_base = OTHER; note = 2'-O-methyl-guanosine-3'-phosphate
  modified_base 7: mod_base = OTHER; note = 2'-O-methyl-adenosine-3'-phosphate
  modified_base 8: mod_base = OTHER; note = 2'-O-methyl-guanosine-3'-phosphate
  modified_base 9: mod_base = OTHER; note = 2'-fluoro-adenosine-3'-phosphate
  modified_base 10: mod_base = OTHER; note = 2'-fluoro-cytidine-3'-phosphate
  modified_base 11: mod_base = OTHER; note = 2'-O-methyl-cytidine-3'-phosphate
  modified_base 12: mod_base = OTHER; note = 2'-O-methyl-adenosine-3'-phosphate
  modified_base 13: mod_base = OTHER; note = 2'-O-methyl-adenosine-3'-phosphate
  modified_base 14: mod_base = OTHER; note = 2'-O-methyl-guanosine-3'-phosphate
  modified_base 15: mod_base = OTHER; note = 2'-O-methyl-adenosine-3'-phosphate
  modified_base 16: mod_base = OTHER; note = 2'-O-methyl-uridine-3'-phosphate
  modified_base 17: mod_base = OTHER; note = 2'-O-methyl-guanosine-3'-phosphate
  modified_base 18: mod_base = OTHER; note = 2'-O-methyl-adenosine-3'-phosphate
  modified_base 19: mod_base = OTHER; note = 2'-O-methyl-adenosine-3'-phosphate
gtgaagagaccaagatgaa

SEQ ID NO: 668 - RNA, 21 nt, synthetic construct
  source 1..21: mol_type = other RNA
ttcatcttggtctcttcactt

SEQ ID NO: 669 - RNA, 19 nt, synthetic construct
  source 1..19: mol_type = other RNA
  modified_base 1: mod_base = OTHER; note = 2'-O-methyl-guanosine-3'-phosphate
  modified_base 2: mod_base = OTHER; note = 2'-O-methyl-uridine-3'-phosphate
  modified_base 3: mod_base = OTHER; note = 2'-O-methyl-guanosine-3'-phosphate
  modified_base 4: mod_base = OTHER; note = 2'-O-methyl-adenosine-3'-phosphate
  modified_base 5: mod_base = OTHER; note = 2'-fluoro-adenosine-3'-phosphate
  modified_base 6: mod_base = OTHER; note = 2'-fluoro-guanosine-3'-phosphate
  modified_base 7: mod_base = OTHER; note = 2'-O-methyl-adenosine-3'-phosphate
  modified_base 8: mod_base = OTHER; note = 2'-O-methyl-guanosine-3'-phosphate
  modified_base 9: mod_base = OTHER; note = 2'-O-methyl-adenosine-3'-phosphate
  modified_base 10: mod_base = OTHER; note = 2'-fluoro-cytidine-3'-phosphate
  modified_base 11: mod_base = OTHER; note = 2'-O-methyl-cytidine-3'-phosphate
  modified_base 12: mod_base = OTHER; note = 2'-O-methyl-adenosine-3'-phosphate
  modified_base 13: mod_base = OTHER; note = 2'-O-methyl-adenosine-3'-phosphate
  modified_base 14: mod_base = OTHER; note = 2'-O-methyl-guanosine-3'-phosphate
  modified_base 15: mod_base = OTHER; note = 2'-O-methyl-adenosine-3'-phosphate
  modified_base 16: mod_base = OTHER; note = 2'-O-methyl-uridine-3'-phosphate
  modified_base 17: mod_base = OTHER; note = 2'-O-methyl-guanosine-3'-phosphate
  modified_base 18: mod_base = OTHER; note = 2'-O-methyl-adenosine-3'-phosphate
  modified_base 19: mod_base = OTHER; note = 2'-O-methyl-adenosine-3'-phosphate
gtgaagagaccaagatgaa

SEQ ID NO: 670 - RNA, 21 nt, synthetic construct
  source 1..21: mol_type = other RNA
ttcatcttggtctcttcactt

SEQ ID NO: 671 - RNA, 19 nt, synthetic construct
  source 1..19: mol_type = other RNA
  modified_base 1: mod_base = OTHER; note = 2'-O-methyl-guanosine-3'-phosphate
  modified_base 2: mod_base = OTHER; note = 2'-O-methyl-uridine-3'-phosphate
  modified_base 3: mod_base = OTHER; note = 2'-O-methyl-guanosine-3'-phosphate
  modified_base 4: mod_base = OTHER; note = 2'-O-methyl-adenosine-3'-phosphate
  modified_base 5: mod_base = OTHER; note = 2'-fluoro-adenosine-3'-phosphate
  modified_base 6: mod_base = OTHER; note = 2'-fluoro-guanosine-3'-phosphate
  modified_base 7: mod_base = OTHER; note = 2'-fluoro-adenosine-3'-phosphate
  modified_base 8: mod_base = OTHER; note = 2'-O-methyl-guanosine-3'-phosphate
  modified_base 9: mod_base = OTHER; note = 2'-O-methyl-adenosine-3'-phosphate
  modified_base 10: mod_base = OTHER; note = 2'-O-methyl-cytidine-3'-phosphate
  modified_base 11: mod_base = OTHER; note = 2'-O-methyl-cytidine-3'-phosphate
  modified_base 12: mod_base = OTHER; note = 2'-O-methyl-adenosine-3'-phosphate
  modified_base 13: mod_base = OTHER; note = 2'-O-methyl-adenosine-3'-phosphate
  modified_base 14: mod_base = OTHER; note = 2'-O-methyl-guanosine-3'-phosphate
  modified_base 15: mod_base = OTHER; note = 2'-O-methyl-adenosine-3'-phosphate
  modified_base 16: mod_base = OTHER; note = 2'-O-methyl-uridine-3'-phosphate
  modified_base 17: mod_base = OTHER; note = 2'-O-methyl-guanosine-3'-phosphate
  modified_base 18: mod_base = OTHER; note = 2'-O-methyl-adenosine-3'-phosphate
  modified_base 19: mod_base = OTHER; note = 2'-O-methyl-adenosine-3'-phosphate
gtgaagagaccaagatgaa

SEQ ID NO: 672 - RNA, 21 nt, synthetic construct
  source 1..21: mol_type = other RNA
ttcatcttggtctcttcactt

SEQ ID NO: 673 - RNA, 19 nt, synthetic construct
  source 1..19: mol_type = other RNA
  modified_base 1: mod_base = OTHER; note = 2'-O-methyl-guanosine-3'-phosphate
  modified_base 2: mod_base = OTHER; note = 2'-O-methyl-uridine-3'-phosphate
  modified_base 3: mod_base = OTHER; note = 2'-O-methyl-guanosine-3'-phosphate
  modified_base 4: mod_base = OTHER; note = 2'-O-methyl-adenosine-3'-phosphate
  modified_base 5: mod_base = OTHER; note = 2'-fluoro-adenosine-3'-phosphate
  modified_base 6: mod_base = OTHER; note = 2'-fluoro-guanosine-3'-phosphate
  modified_base 7: mod_base = OTHER; note = 2'-fluoro-adenosine-3'-phosphate
  modified_base 8: mod_base = OTHER; note = 2'-fluoro-guanosine-3'-phosphate
  modified_base 9: mod_base = OTHER; note = 2'-O-methyl-adenosine-3'-phosphate
  modified_base 10: mod_base = OTHER; note = 2'-O-methyl-cytidine-3'-phosphate
  modified_base 11: mod_base = OTHER; note = 2'-O-methyl-cytidine-3'-phosphate
  modified_base 12: mod_base = OTHER; note = 2'-O-methyl-adenosine-3'-phosphate
  modified_base 13: mod_base = OTHER; note = 2'-O-methyl-adenosine-3'-phosphate
  modified_base 14: mod_base = OTHER; note = 2'-O-methyl-guanosine-3'-phosphate
  modified_base 15: mod_base = OTHER; note = 2'-O-methyl-adenosine-3'-phosphate
  modified_base 16: mod_base = OTHER; note = 2'-O-methyl-uridine-3'-phosphate
  modified_base 17: mod_base = OTHER; note = 2'-O-methyl-guanosine-3'-phosphate
  modified_base 18: mod_base = OTHER; note = 2'-O-methyl-adenosine-3'-phosphate
  modified_base 19: mod_base = OTHER; note = 2'-O-methyl-adenosine-3'-phosphate
gtgaagagaccaagatgaa

SEQ ID NO: 674 - RNA, 21 nt, synthetic construct
  source 1..21: mol_type = other RNA
ttcatcttggtctcttcactt

SEQ ID NO: 675 - RNA, 19 nt, synthetic construct
  source 1..19: mol_type = other RNA
  modified_base 1: mod_base = OTHER; note = 2'-O-methyl-guanosine-3'-phosphate
  modified_base 2: mod_base = OTHER; note = 2'-O-methyl-uridine-3'-phosphate
  modified_base 3: mod_base = OTHER; note = 2'-O-methyl-guanosine-3'-phosphate
  modified_base 4: mod_base = OTHER; note = 2'-O-methyl-adenosine-3'-phosphate
  modified_base 5: mod_base = OTHER; note = 2'-fluoro-adenosine-3'-phosphate
  modified_base 6: mod_base = OTHER; note = 2'-fluoro-guanosine-3'-phosphate
  modified_base 7: mod_base = OTHER; note = 2'-fluoro-adenosine-3'-phosphate
  modified_base 8: mod_base = OTHER; note = 2'-fluoro-guanosine-3'-phosphate
  modified_base 9: mod_base = OTHER; note = 2'-fluoro-adenosine-3'-phosphate
  modified_base 10: mod_base = OTHER; note = 2'-O-methyl-cytidine-3'-phosphate
  modified_base 11: mod_base = OTHER; note = 2'-O-methyl-cytidine-3'-phosphate
  modified_base 12: mod_base = OTHER; note = 2'-O-methyl-adenosine-3'-phosphate
  modified_base 13: mod_base = OTHER; note = 2'-O-methyl-adenosine-3'-phosphate
  modified_base 14: mod_base = OTHER; note = 2'-O-methyl-guanosine-3'-phosphate
  modified_base 15: mod_base = OTHER; note = 2'-O-methyl-adenosine-3'-phosphate
  modified_base 16: mod_base = OTHER; note = 2'-O-methyl-uridine-3'-phosphate
  modified_base 17: mod_base = OTHER; note = 2'-O-methyl-guanosine-3'-phosphate
  modified_base 18: mod_base = OTHER; note = 2'-O-methyl-adenosine-3'-phosphate
  modified_base 19: mod_base = OTHER; note = 2'-O-methyl-adenosine-3'-phosphate
gtgaagagaccaagatgaa

SEQ ID NO: 676 - RNA, 21 nt, synthetic construct
  source 1..21: mol_type = other RNA
ttcatcttggtctcttcactt

SEQ ID NO: 677 - RNA, 19 nt, synthetic construct
  source 1..19: mol_type = other RNA
  modified_base 1: mod_base = OTHER; note = 2'-O-methyl-guanosine-3'-thiophosphate-phosphate
  modified_base 2: mod_base = OTHER; note = 2'-O-methyl-uridine-3'-phosphate
  modified_base 3: mod_base = OTHER; note = 2'-O-methyl-guanosine-3'-phosphate
  modified_base 4: mod_base = OTHER; note = 2'-O-methyl-adenosine-3'-phosphate
  modified_base 5: mod_base = OTHER; note = 2'-fluoro-adenosine-3'-phosphate
  modified_base 6: mod_base = OTHER; note = 2'-fluoro-guanosine-3'-phosphate
  modified_base 7: mod_base = OTHER; note = 2'-fluoro-adenosine-3'-phosphate
  modified_base 8: mod_base = OTHER; note = 2'-fluoro-guanosine-3'-phosphate
  modified_base 9: mod_base = OTHER; note = 2'-fluoro-adenosine-3'-phosphate
  modified_base 10: mod_base = OTHER; note = 2'-fluoro-cytidine-3'-phosphate
  modified_base 11: mod_base = OTHER; note = 2'-O-methyl-cytidine-3'-phosphate
  modified_base 12: mod_base = OTHER; note = 2'-O-methyl-adenosine-3'-phosphate
  modified_base 13: mod_base = OTHER; note = 2'-O-methyl-adenosine-3'-phosphate
  modified_base 14: mod_base = OTHER; note = 2'-O-methyl-guanosine-3'-phosphate
  modified_base 15: mod_base = OTHER; note = 2'-O-methyl-adenosine-3'-phosphate
  modified_base 16: mod_base = OTHER; note = 2'-O-methyl-uridine-3'-phosphate
  modified_base 17: mod_base = OTHER; note = 2'-O-methyl-guanosine-3'-phosphate
  modified_base 18: mod_base = OTHER; note = 2'-O-methyl-adenosine-3'-phosphate
  modified_base 19: mod_base = OTHER; note = 2'-O-methyl-adenosine-3'-phosphate
gtgaagagaccaagatgaa

SEQ ID NO: 678 - RNA, 21 nt, synthetic construct
  source 1..21: mol_type = other RNA
ttcatcttggtctcttcactt

SEQ ID NO: 679 - RNA, 19 nt, synthetic construct
  source 1..19: mol_type = other RNA
  modified_base 1: mod_base = OTHER; note = 2'-O-methyl-guanosine-3'-thiophosphate-phosphate
  modified_base 2: mod_base = OTHER; note = 2'-O-methyl-uridine-3'-thiophosphate-phosphate
  modified_base 3: mod_base = OTHER; note = 2'-O-methyl-guanosine-3'-phosphate
  modified_base 4: mod_base = OTHER; note = 2'-O-methyl-adenosine-3'-phosphate
  modified_base 5: mod_base = OTHER; note = 2'-fluoro-adenosine-3'-phosphate
  modified_base 6: mod_base = OTHER; note = 2'-fluoro-guanosine-3'-phosphate
  modified_base 7: mod_base = OTHER; note = 2'-fluoro-adenosine-3'-phosphate
  modified_base 8: mod_base = OTHER; note = 2'-fluoro-guanosine-3'-phosphate
  modified_base 9: mod_base = OTHER; note = 2'-fluoro-adenosine-3'-phosphate
  modified_base 10: mod_base = OTHER; note = 2'-fluoro-cytidine-3'-phosphate
  modified_base 11: mod_base = OTHER; note = 2'-O-methyl-cytidine-3'-phosphate
  modified_base 12: mod_base = OTHER; note = 2'-O-methyl-adenosine-3'-phosphate
  modified_base 13: mod_base = OTHER; note = 2'-O-methyl-adenosine-3'-phosphate
  modified_base 14: mod_base = OTHER; note = 2'-O-methyl-guanosine-3'-phosphate
  modified_base 15: mod_base = OTHER; note = 2'-O-methyl-adenosine-3'-phosphate
  modified_base 16: mod_base = OTHER; note = 2'-O-methyl-uridine-3'-phosphate
  modified_base 17: mod_base = OTHER; note = 2'-O-methyl-guanosine-3'-phosphate
  modified_base 18: mod_base = OTHER; note = 2'-O-methyl-adenosine-3'-phosphate
  modified_base 19: mod_base = OTHER; note = 2'-O-methyl-adenosine-3'-phosphate
gtgaagagaccaagatgaa

SEQ ID NO: 680 - RNA, 21 nt, synthetic construct
  source 1..21: mol_type = other RNA
ttcatcttggtctcttcactt

SEQ ID NO: 681 - RNA, 19 nt, synthetic construct
  source 1..19: mol_type = other RNA
  modified_base 1: mod_base = OTHER; note = 2'-O-methyl-guanosine-3'-thiophosphate-phosphate
  modified_base 2: mod_base = OTHER; note = 2'-O-methyl-uridine-3'-thiophosphate-phosphate
  modified_base 3: mod_base = OTHER; note = 2'-O-methyl-guanosine-3'-phosphate
  modified_base 4: mod_base = OTHER; note = 2'-O-methyl-adenosine-3'-phosphate
  modified_base 5: mod_base = OTHER; note = 2'-fluoro-adenosine-3'-phosphate
  modified_base 6: mod_base = OTHER; note = 2'-fluoro-guanosine-3'-phosphate
  modified_base 7: mod_base = OTHER; note = 2'-fluoro-adenosine-3'-phosphate
  modified_base 8: mod_base = OTHER; note = 2'-fluoro-guanosine-3'-phosphate
  modified_base 9: mod_base = OTHER; note = 2'-fluoro-adenosine-3'-phosphate
  modified_base 10: mod_base = OTHER; note = 2'-fluoro-cytidine-3'-phosphate
  modified_base 11: mod_base = OTHER; note = 2'-O-methyl-cytidine-3'-phosphate
  modified_base 12: mod_base = OTHER; note = 2'-O-methyl-adenosine-3'-phosphate
  modified_base 13: mod_base = OTHER; note = 2'-O-methyl-adenosine-3'-phosphate
  modified_base 14: mod_base = OTHER; note = 2'-O-methyl-guanosine-3'-phosphate
  modified_base 15: mod_base = OTHER; note = 2'-O-methyl-adenosine-3'-phosphate
  modified_base 16: mod_base = OTHER; note = 2'-O-methyl-uridine-3'-phosphate
  modified_base 17: mod_base = OTHER; note = 2'-O-methyl-guanosine-3'-phosphate
  modified_base 18: mod_base = OTHER; note = 2'-O-methyl-adenosine-3'-phosphate
  modified_base 19: mod_base = OTHER; note = 2'-O-methyl-adenosine-3'-phosphate
gtgaagagaccaagatgaa

SEQ ID NO: 682 - RNA, 21 nt, synthetic construct
  source 1..21: mol_type = other RNA
  modified_base 1: mod_base = OTHER; note = 2'-O-methyl-uridine-3'-thiophosphate-phosphate
  modified_base 2: mod_base = OTHER; note = 2'-fluoro-uridine-3'-thiophosphate-phosphate
  modified_base 3: mod_base = OTHER; note = 2'-O-methyl-cytidine-3'-phosphate
  modified_base 4: mod_base = OTHER; note = 2'-fluoro-adenosine-3'-phosphate
  modified_base 5: mod_base = OTHER; note = 2'-O-methyl-uridine-3'-phosphate
  modified_base 6: mod_base = OTHER; note = 2'-fluoro-cytidine-3'-phosphate
  modified_base 7: mod_base = OTHER; note = 2'-O-methyl-uridine-3'-phosphate
  modified_base 8: mod_base = OTHER; note = 2'-fluoro-uridine-3'-phosphate
  modified_base 9: mod_base = OTHER; note = 2'-O-methyl-guanosine-3'-phosphate
  modified_base 10: mod_base = OTHER; note = 2'-O-methyl-guanosine-3'-phosphate
  modified_base 11: mod_base = OTHER; note = 2'-O-methyl-uridine-3'-phosphate
  modified_base 12: mod_base = OTHER; note = 2'-fluoro-cytidine-3'-phosphate
  modified_base 13: mod_base = OTHER; note = 2'-O-methyl-uridine-3'-phosphate
  modified_base 14: mod_base = OTHER; note = 2'-fluoro-cytidine-3'-phosphate
  modified_base 15: mod_base = OTHER; note = 2'-O-methyl-uridine-3'-phosphate
  modified_base 16: mod_base = OTHER; note = 2'-fluoro-uridine-3'-phosphate
  modified_base 17: mod_base = OTHER; note = 2'-O-methyl-cytidine-3'-phosphate
  modified_base 18: mod_base = OTHER; note = 2'-fluoro-adenosine-3'-phosphate
  modified_base 19: mod_base = OTHER; note = 2'-O-methyl-cytidine-3'-thiophosphate-phosphate
  modified_base 20: mod_base = OTHER; note = 2'-O-methyl-uridine-3'-thiophosphate-phosphate
  modified_base 21: mod_base = OTHER; note = 2'-O-methyl-cytidine-3'-phosphate
ttcatcttggtctcttcactc

SEQ ID NO: 683 - RNA, 20 nt, synthetic construct
  source 1..20: mol_type = other RNA
  modified_base 1: mod_base = OTHER; note = inverted 2'-deoxy-adenosine-3'-phosphate
  modified_base 2: mod_base = OTHER; note = 2'-O-methyl-guanosine-3'-phosphate
  modified_base 3: mod_base = OTHER; note = 2'-O-methyl-uridine-3'-phosphate
  modified_base 4: mod_base = OTHER; note = 2'-O-methyl-guanosine-3'-phosphate
  modified_base 5: mod_base = OTHER; note = 2'-O-methyl-adenosine-3'-phosphate
  modified_base 6: mod_base = OTHER; note = 2'-fluoro-adenosine-3'-phosphate
  modified_base 7: mod_base = OTHER; note = 2'-fluoro-guanosine-3'-phosphate
  modified_base 8: mod_base = OTHER; note = 2'-fluoro-adenosine-3'-phosphate
  modified_base 9: mod_base = OTHER; note = 2'-fluoro-guanosine-3'-phosphate
  modified_base 10: mod_base = OTHER; note = 2'-fluoro-adenosine-3'-phosphate
  modified_base 11: mod_base = OTHER; note = 2'-fluoro-cytidine-3'-phosphate
  modified_base 12: mod_base = OTHER; note = 2'-O-methyl-cytidine-3'-phosphate
  modified_base 13: mod_base = OTHER; note = 2'-O-methyl-adenosine-3'-phosphate
  modified_base 14: mod_base = OTHER; note = 2'-O-methyl-adenosine-3'-phosphate
  modified_base 15: mod_base = OTHER; note = 2'-O-methyl-guanosine-3'-phosphate
  modified_base 16: mod_base = OTHER; note = 2'-O-methyl-adenosine-3'-phosphate
  modified_base 17: mod_base = OTHER; note = 2'-O-methyl-uridine-3'-phosphate
  modified_base 18: mod_base = OTHER; note = 2'-O-methyl-guanosine-3'-phosphate
  modified_base 19: mod_base = OTHER; note = 2'-O-methyl-adenosine-3'-phosphate
  modified_base 20: mod_base = OTHER; note = 2'-O-methyl-adenosine-3'-phosphate
agtgaagagaccaagatgaa

SEQ ID NO: 684 - RNA, 21 nt, synthetic construct
  source 1..21: mol_type = other RNA
ttcatcttggtctcttcactt

SEQ ID NO: 685 - RNA, 19 nt, synthetic construct
  source 1..19: mol_type = other RNA
  modified_base 1: mod_base = OTHER; note = inverted 2'-deoxy-adenosine-3'-phosphate
  modified_base 2: mod_base = OTHER; note = 2'-O-methyl-uridine-3'-phosphate
  modified_base 3: mod_base = OTHER; note = 2'-O-methyl-guanosine-3'-phosphate
  modified_base 4: mod_base = OTHER; note = 2'-O-methyl-adenosine-3'-phosphate
  modified_base 5: mod_base = OTHER; note = 2'-fluoro-adenosine-3'-phosphate
  modified_base 6: mod_base = OTHER; note = 2'-fluoro-guanosine-3'-phosphate
  modified_base 7: mod_base = OTHER; note = 2'-fluoro-adenosine-3'-phosphate
  modified_base 8: mod_base = OTHER; note = 2'-fluoro-guanosine-3'-phosphate
  modified_base 9: mod_base = OTHER; note = 2'-fluoro-adenosine-3'-phosphate
  modified_base 10: mod_base = OTHER; note = 2'-fluoro-cytidine-3'-phosphate
  modified_base 11: mod_base = OTHER; note = 2'-O-methyl-cytidine-3'-phosphate
  modified_base 12: mod_base = OTHER; note = 2'-O-methyl-adenosine-3'-phosphate
  modified_base 13: mod_base = OTHER; note = 2'-O-methyl-adenosine-3'-phosphate
  modified_base 14: mod_base = OTHER; note = 2'-O-methyl-guanosine-3'-phosphate
  modified_base 15: mod_base = OTHER; note = 2'-O-methyl-adenosine-3'-phosphate
  modified_base 16: mod_base = OTHER; note = 2'-O-methyl-uridine-3'-phosphate
  modified_base 17: mod_base = OTHER; note = 2'-O-methyl-guanosine-3'-phosphate
  modified_base 18: mod_base = OTHER; note = 2'-O-methyl-adenosine-3'-phosphate
  modified_base 19: mod_base = OTHER; note = 2'-O-methyl-adenosine-3'-phosphate
atgaagagaccaagatgaa

SEQ ID NO: 686 - RNA, 21 nt, synthetic construct
  source 1..21: mol_type = other RNA
ttcatcttggtctcttcattt

SEQ ID NO: 687 - RNA, 19 nt, synthetic construct
  source 1..19: mol_type = other RNA
cagagcaacagttcttcaa

SEQ ID NO: 688 - RNA, 21 nt, synthetic construct
  source 1..21: mol_type = other RNA
  modified_base 1: mod_base = OTHER; note = 2'-O-methyl-uridine-3'-phosphate
  modified_base 2: mod_base = OTHER; note = 2'-fluoro-uridine-3'-phosphate
  modified_base 3: mod_base = OTHER; note = 2'-O-methyl-guanosine-3'-phosphate
  modified_base 4: mod_base = OTHER; note = 2'-fluoro-adenosine-3'-phosphate
  modified_base 5: mod_base = OTHER; note = 2'-O-methyl-adenosine-3'-phosphate
  modified_base 6: mod_base = OTHER; note = 2'-fluoro-guanosine-3'-phosphate
  modified_base 7: mod_base = OTHER; note = 2'-O-methyl-adenosine-3'-phosphate
  modified_base 8: mod_base = OTHER; note = 2'-fluoro-adenosine-3'-phosphate
  modified_base 9: mod_base = OTHER; note = 2'-O-methyl-cytidine-3'-phosphate
  modified_base 10: mod_base = OTHER; note = 2'-O-methyl-uridine-3'-phosphate
  modified_base 11: mod_base = OTHER; note = 2'-O-methyl-guanosine-3'-phosphate
  modified_base 12: mod_base = OTHER; note = 2'-fluoro-uridine-3'-phosphate
  modified_base 13: mod_base = OTHER; note = 2'-O-methyl-uridine-3'-phosphate
  modified_base 14: mod_base = OTHER; note = 2'-fluoro-guanosine-3'-phosphate
  modified_base 15: mod_base = OTHER; note = 2'-O-methyl-cytidine-3'-phosphate
  modified_base 16: mod_base = OTHER; note = 2'-fluoro-uridine-3'-phosphate
  modified_base 17: mod_base = OTHER; note = 2'-O-methyl-cytidine-3'-phosphate
  modified_base 18: mod_base = OTHER; note = 2'-fluoro-uridine-3'-phosphate
  modified_base 19: mod_base = OTHER; note = 2'-O-methyl-guanosine-3'-phosphate
  modified_base 20: mod_base = OTHER; note = 2'-O-methyl-guanosine-3'-phosphate
  modified_base 21: mod_base = OTHER; note = 2'-O-methyl-adenosine-3'-phosphate
ttgaagaactgttgctctgga

SEQ ID NO: 689 - RNA, 19 nt, synthetic construct
  source 1..19: mol_type = other RNA
cagagcaacagttcttcaa

SEQ ID NO: 690 - RNA, 21 nt, synthetic construct
  source 1..21: mol_type = other RNA
  modified_base 1: mod_base = OTHER; note = 2'-O-methyl-uridine-3'-phosphate
  modified_base 2: mod_base = OTHER; note = 2'-fluoro-uridine-3'-phosphate
  modified_base 3: mod_base = OTHER; note = 2'-O-methyl-guanosine-3'-phosphate
  modified_base 4: mod_base = OTHER; note = 2'-fluoro-adenosine-3'-phosphate
  modified_base 5: mod_base = OTHER; note = 2'-O-methyl-adenosine-3'-phosphate
  modified_base 6: mod_base = OTHER; note = 2'-fluoro-guanosine-3'-phosphate
  modified_base 7: mod_base = OTHER; note = 2'-O-methyl-adenosine-3'-phosphate
  modified_base 8: mod_base = OTHER; note = 2'-fluoro-adenosine-3'-phosphate
  modified_base 9: mod_base = OTHER; note = 2'-fluoro-cytidine-3'-phosphate
  modified_base 10: mod_base = OTHER; note = 2'-O-methyl-uridine-3'-phosphate
  modified_base 11: mod_base = OTHER; note = 2'-O-methyl-guanosine-3'-phosphate
  modified_base 12: mod_base = OTHER; note = 2'-fluoro-uridine-3'-phosphate
  modified_base 13: mod_base = OTHER; note = 2'-O-methyl-uridine-3'-phosphate
  modified_base 14: mod_base = OTHER; note = 2'-fluoro-guanosine-3'-phosphate
  modified_base 15: mod_base = OTHER; note = 2'-O-methyl-cytidine-3'-phosphate
  modified_base 16: mod_base = OTHER; note = 2'-fluoro-uridine-3'-phosphate
  modified_base 17: mod_base = OTHER; note = 2'-O-methyl-cytidine-3'-phosphate
  modified_base 18: mod_base = OTHER; note = 2'-fluoro-uridine-3'-phosphate
  modified_base 19: mod_base = OTHER; note = 2'-O-methyl-guanosine-3'-phosphate
  modified_base 20: mod_base = OTHER; note = 2'-O-methyl-guanosine-3'-phosphate
  modified_base 21: mod_base = OTHER; note = 2'-O-methyl-adenosine-3'-phosphate
ttgaagaactgttgctctgga

SEQ ID NO: 691 - RNA, 19 nt, synthetic construct
  source 1..19: mol_type = other RNA
cagagcaacagttcttcaa

SEQ ID NO: 692 - RNA, 21 nt, synthetic construct
  source 1..21: mol_type = other RNA
  modified_base 1: mod_base = OTHER; note = 2'-O-methyl-uridine-3'-phosphate
  modified_base 2: mod_base = OTHER; note = 2'-fluoro-uridine-3'-phosphate
  modified_base 3: mod_base = OTHER; note = 2'-O-methyl-guanosine-3'-phosphate
  modified_base 4: mod_base = OTHER; note = 2'-fluoro-adenosine-3'-phosphate
  modified_base 5: mod_base = OTHER; note = 2'-O-methyl-adenosine-3'-phosphate
  modified_base 6: mod_base = OTHER; note = 2'-fluoro-guanosine-3'-phosphate
  modified_base 7: mod_base = OTHER; note = 2'-O-methyl-adenosine-3'-phosphate
  modified_base 8: mod_base = OTHER; note = 2'-fluoro-adenosine-3'-phosphate
  modified_base 9: mod_base = OTHER; note = 2'-O-methyl-cytidine-3'-phosphate
  modified_base 10: mod_base = OTHER; note = 2'-fluoro-uridine-3'-phosphate
  modified_base 11: mod_base = OTHER; note = 2'-O-methyl-guanosine-3'-phosphate
  modified_base 12: mod_base = OTHER; note = 2'-fluoro-uridine-3'-phosphate
  modified_base 13: mod_base = OTHER; note = 2'-O-methyl-uridine-3'-phosphate
  modified_base 14: mod_base = OTHER; note = 2'-fluoro-guanosine-3'-phosphate
  modified_base 15: mod_base = OTHER; note = 2'-O-methyl-cytidine-3'-phosphate
  modified_base 16: mod_base = OTHER; note = 2'-fluoro-uridine-3'-phosphate
  modified_base 17: mod_base = OTHER; note = 2'-O-methyl-cytidine-3'-phosphate
  modified_base 18: mod_base = OTHER; note = 2'-fluoro-uridine-3'-phosphate
  modified_base 19: mod_base = OTHER; note = 2'-O-methyl-guanosine-3'-phosphate
  modified_base 20: mod_base = OTHER; note = 2'-O-methyl-guanosine-3'-phosphate
  modified_base 21: mod_base = OTHER; note = 2'-O-methyl-adenosine-3'-phosphate
ttgaagaactgttgctctgga

SEQ ID NO: 693 - RNA, 19 nt, synthetic construct
  source 1..19: mol_type = other RNA
cagagcaacagttcttcaa

SEQ ID NO: 694 - RNA, 21 nt, synthetic construct
  source 1..21: mol_type = other RNA
  modified_base 1: mod_base = OTHER; note = 2'-O-methyl-uridine-3'-phosphate
  modified_base 2: mod_base = OTHER; note = 2'-fluoro-uridine-3'-phosphate
  modified_base 3: mod_base = OTHER; note = 2'-O-methyl-guanosine-3'-phosphate
  modified_base 4: mod_base = OTHER; note = 2'-fluoro-adenosine-3'-phosphate
  modified_base 5: mod_base = OTHER; note = 2'-O-methyl-adenosine-3'-phosphate
  modified_base 6: mod_base = OTHER; note = 2'-fluoro-guanosine-3'-phosphate
  modified_base 7: mod_base = OTHER; note = 2'-O-methyl-adenosine-3'-phosphate
  modified_base 8: mod_base = OTHER; note = 2'-fluoro-adenosine-3'-phosphate
  modified_base 9: mod_base = OTHER; note = 2'-O-methyl-cytidine-3'-phosphate
  modified_base 10: mod_base = OTHER; note = 2'-O-methyl-uridine-3'-phosphate
  modified_base 11: mod_base = OTHER; note = 2'-fluoro-guanosine-3'-phosphate
  modified_base 12: mod_base = OTHER; note = 2'-fluoro-uridine-3'-phosphate
  modified_base 13: mod_base = OTHER; note = 2'-O-methyl-uridine-3'-phosphate
  modified_base 14: mod_base = OTHER; note = 2'-fluoro-guanosine-3'-phosphate
  modified_base 15: mod_base = OTHER; note = 2'-O-methyl-cytidine-3'-phosphate
  modified_base 16: mod_base = OTHER; note = 2'-fluoro-uridine-3'-phosphate
  modified_base 17: mod_base = OTHER; note = 2'-O-methyl-cytidine-3'-phosphate
  modified_base 18: mod_base = OTHER; note = 2'-fluoro-uridine-3'-phosphate
  modified_base 19: mod_base = OTHER; note = 2'-O-methyl-guanosine-3'-phosphate
  modified_base 20: mod_base = OTHER; note = 2'-O-methyl-guanosine-3'-phosphate
  modified_base 21: mod_base = OTHER; note = 2'-O-methyl-adenosine-3'-phosphate
ttgaagaactgttgctctgga

SEQ ID NO: 695 - RNA, 19 nt, synthetic construct
  source 1..19: mol_type = other RNA
cagagcaacagttcttcaa

SEQ ID NO: 696 - RNA, 21 nt, synthetic construct
  source 1..21: mol_type = other RNA
  modified_base 1: mod_base = OTHER; note = 2'-O-methyl-uridine-3'-phosphate
  modified_base 2: mod_base = OTHER; note = 2'-O-methyl-uridine-3'-phosphate
  modified_base 3: mod_base = OTHER; note = 2'-O-methyl-guanosine-3'-phosphate
  modified_base 4: mod_base = OTHER; note = 2'-fluoro-adenosine-3'-phosphate
  modified_base 5: mod_base = OTHER; note = 2'-O-methyl-adenosine-3'-phosphate
  modified_base 6: mod_base = OTHER; note = 2'-fluoro-guanosine-3'-phosphate
  modified_base 7: mod_base = OTHER; note = 2'-O-methyl-adenosine-3'-phosphate
  modified_base 8: mod_base = OTHER; note = 2'-fluoro-adenosine-3'-phosphate
  modified_base 9: mod_base = OTHER; note = 2'-O-methyl-cytidine-3'-phosphate
  modified_base 10: mod_base = OTHER; note = 2'-O-methyl-uridine-3'-phosphate
  modified_base 11: mod_base = OTHER; note = 2'-O-methyl-guanosine-3'-phosphate
  modified_base 12: mod_base = OTHER; note = 2'-fluoro-uridine-3'-phosphate
  modified_base 13: mod_base = OTHER; note = 2'-O-methyl-uridine-3'-phosphate
  modified_base 14: mod_base = OTHER; note = 2'-fluoro-guanosine-3'-phosphate
  modified_base 15: mod_base = OTHER; note = 2'-O-methyl-cytidine-3'-phosphate
  modified_base 16: mod_base = OTHER; note = 2'-fluoro-uridine-3'-phosphate
  modified_base 17: mod_base = OTHER; note = 2'-O-methyl-cytidine-3'-phosphate
  modified_base 18: mod_base = OTHER; note = 2'-fluoro-uridine-3'-phosphate
  modified_base 19: mod_base = OTHER; note = 2'-O-methyl-guanosine-3'-phosphate
  modified_base 20: mod_base = OTHER; note = 2'-O-methyl-guanosine-3'-phosphate
  modified_base 21: mod_base = OTHER; note = 2'-O-methyl-adenosine-3'-phosphate
ttgaagaactgttgctctgga

SEQ ID NO: 697 - RNA, 19 nt, synthetic construct
  source 1..19: mol_type = other RNA
cagagcaacagttcttcaa

SEQ ID NO: 698 - RNA, 21 nt, synthetic construct
  source 1..21: mol_type = other RNA
  modified_base 1: mod_base = OTHER; note = 2'-O-methyl-uridine-3'-phosphate
  modified_base 2: mod_base = OTHER; note = 2'-fluoro-uridine-3'-phosphate
  modified_base 3: mod_base = OTHER; note = 2'-O-methyl-guanosine-3'-phosphate
  modified_base 4: mod_base = OTHER; note = 2'-O-methyl-adenosine-3'-phosphate
  modified_base 5: mod_base = OTHER; note = 2'-O-methyl-adenosine-3'-phosphate
  modified_base 6: mod_base = OTHER; note = 2'-fluoro-guanosine-3'-phosphate
  modified_base 7: mod_base = OTHER; note = 2'-O-methyl-adenosine-3'-phosphate
  modified_base 8: mod_base = OTHER; note = 2'-fluoro-adenosine-3'-phosphate
  modified_base 9: mod_base = OTHER; note = 2'-O-methyl-cytidine-3'-phosphate
  modified_base 10: mod_base = OTHER; note = 2'-O-methyl-uridine-3'-phosphate
  modified_base 11: mod_base = OTHER; note = 2'-O-methyl-guanosine-3'-phosphate
  modified_base 12: mod_base = OTHER; note = 2'-fluoro-uridine-3'-phosphate
  modified_base 13: mod_base = OTHER; note = 2'-O-methyl-uridine-3'-phosphate
  modified_base 14: mod_base = OTHER; note = 2'-fluoro-guanosine-3'-phosphate
  modified_base 15: mod_base = OTHER; note = 2'-O-methyl-cytidine-3'-phosphate
  modified_base 16: mod_base = OTHER; note = 2'-fluoro-uridine-3'-phosphate
  modified_base 17: mod_base = OTHER; note = 2'-O-methyl-cytidine-3'-phosphate
  modified_base 18: mod_base = OTHER; note = 2'-fluoro-uridine-3'-phosphate
  modified_base 19: mod_base = OTHER; note = 2'-O-methyl-guanosine-3'-phosphate
  modified_base 20: mod_base = OTHER; note = 2'-O-methyl-guanosine-3'-phosphate
  modified_base 21: mod_base = OTHER; note = 2'-O-methyl-adenosine-3'-phosphate
ttgaagaactgttgctctgga

SEQ ID NO: 699 - RNA, 19 nt, synthetic construct
  source 1..19: mol_type = other RNA
cagagcaacagttcttcaa

SEQ ID NO: 700 - RNA, 21 nt, synthetic construct
  source 1..21: mol_type = other RNA
  modified_base 1: mod_base = OTHER; note = 2'-O-methyl-uridine-3'-phosphate
  modified_base 2: mod_base = OTHER; note = 2'-fluoro-uridine-3'-phosphate
  modified_base 3: mod_base = OTHER; note = 2'-O-methyl-guanosine-3'-phosphate
  modified_base 4: mod_base = OTHER; note = 2'-fluoro-adenosine-3'-phosphate
  modified_base 5: mod_base = OTHER; note = 2'-O-methyl-adenosine-3'-phosphate
  modified_base 6: mod_base = OTHER; note = 2'-O-methyl-guanosine-3'-phosphate
  modified_base 7: mod_base = OTHER; note = 2'-O-methyl-adenosine-3'-phosphate
  modified_base 8: mod_base = OTHER; note = 2'-fluoro-adenosine-3'-phosphate
  modified_base 9: mod_base = OTHER; note = 2'-O-methyl-cytidine-3'-phosphate
  modified_base 10: mod_base = OTHER; note = 2'-O-methyl-uridine-3'-phosphate
  modified_base 11: mod_base = OTHER; note = 2'-O-methyl-guanosine-3'-phosphate
  modified_base 12: mod_base = OTHER; note = 2'-fluoro-uridine-3'-phosphate
  modified_base 13: mod_base = OTHER; note = 2'-O-methyl-uridine-3'-phosphate
  modified_base 14: mod_base = OTHER; note = 2'-fluoro-guanosine-3'-phosphate
  modified_base 15: mod_base = OTHER; note = 2'-O-methyl-cytidine-3'-phosphate
  modified_base 16: mod_base = OTHER; note = 2'-fluoro-uridine-3'-phosphate
  modified_base 17: mod_base = OTHER; note = 2'-O-methyl-cytidine-3'-phosphate
  modified_base 18: mod_base = OTHER; note = 2'-fluoro-uridine-3'-phosphate
  modified_base 19: mod_base = OTHER; note = 2'-O-methyl-guanosine-3'-phosphate
  modified_base 20: mod_base = OTHER; note = 2'-O-methyl-guanosine-3'-phosphate
  modified_base 21: mod_base = OTHER; note = 2'-O-methyl-adenosine-3'-phosphate
ttgaagaactgttgctctgga

SEQ ID NO: 701 - RNA, 19 nt, synthetic construct
  source 1..19: mol_type = other RNA
cagagcaacagttcttcaa

SEQ ID NO: 702 - RNA, 21 nt, synthetic construct
  source 1..21: mol_type = other RNA
  modified_base 1: mod_base = OTHER; note = 2'-O-methyl-uridine-3'-phosphate
  modified_base 2: mod_base = OTHER; note = 2'-fluoro-uridine-3'-phosphate
  modified_base 3: mod_base = OTHER; note = 2'-O-methyl-guanosine-3'-phosphate
  modified_base 4: mod_base = OTHER; note = 2'-fluoro-adenosine-3'-phosphate
  modified_base 5: mod_base = OTHER; note = 2'-O-methyl-adenosine-3'-phosphate
  modified_base 6: mod_base = OTHER; note = 2'-fluoro-guanosine-3'-phosphate
  modified_base 7: mod_base = OTHER; note = 2'-O-methyl-adenosine-3'-phosphate
  modified_base 8: mod_base = OTHER; note = 2'-O-methyl-adenosine-3'-phosphate
  modified_base 9: mod_base = OTHER; note = 2'-O-methyl-cytidine-3'-phosphate
  modified_base 10: mod_base = OTHER; note = 2'-O-methyl-uridine-3'-phosphate
  modified_base 11: mod_base = OTHER; note = 2'-O-methyl-guanosine-3'-phosphate
  modified_base 12: mod_base = OTHER; note = 2'-fluoro-uridine-3'-phosphate
  modified_base 13: mod_base = OTHER; note = 2'-O-methyl-uridine-3'-phosphate
  modified_base 14: mod_base = OTHER; note = 2'-fluoro-guanosine-3'-phosphate
  modified_base 15: mod_base = OTHER; note = 2'-O-methyl-cytidine-3'-phosphate
  modified_base 16: mod_base = OTHER; note = 2'-fluoro-uridine-3'-phosphate
  modified_base 17: mod_base = OTHER; note = 2'-O-methyl-cytidine-3'-phosphate
  modified_base 18: mod_base = OTHER; note = 2'-fluoro-uridine-3'-phosphate
  modified_base 19: mod_base = OTHER; note = 2'-O-methyl-guanosine-3'-phosphate
  modified_base 20: mod_base = OTHER; note = 2'-O-methyl-guanosine-3'-phosphate
  modified_base 21: mod_base = OTHER; note = 2'-O-methyl-adenosine-3'-phosphate
ttgaagaactgttgctctgga

SEQ ID NO: 703 - RNA, 19 nt, synthetic construct
  source 1..19: mol_type = other RNA
cagagcaacagttcttcaa

SEQ ID NO: 704 - RNA, 21 nt, synthetic construct
  source 1..21: mol_type = other RNA
  modified_base 1: mod_base = OTHER; note = 2'-O-methyl-uridine-3'-phosphate
  modified_base 2: mod_base = OTHER; note = 2'-fluoro-uridine-3'-phosphate
  modified_base 3: mod_base = OTHER; note = 2'-O-methyl-guanosine-3'-phosphate
  modified_base 4: mod_base = OTHER; note = 2'-fluoro-adenosine-3'-phosphate
  modified_base 5: mod_base = OTHER; note = 2'-O-methyl-adenosine-3'-phosphate
  modified_base 6: mod_base = OTHER; note = 2'-fluoro-guanosine-3'-phosphate
  modified_base 7: mod_base = OTHER; note = 2'-O-methyl-adenosine-3'-phosphate
  modified_base 8: mod_base = OTHER; note = 2'-fluoro-adenosine-3'-phosphate
  modified_base 9: mod_base = OTHER; note = 2'-O-methyl-cytidine-3'-phosphate
  modified_base 10: mod_base = OTHER; note = 2'-O-methyl-uridine-3'-phosphate
  modified_base 11: mod_base = OTHER; note = 2'-O-methyl-guanosine-3'-phosphate
  modified_base 12: mod_base = OTHER; note = 2'-O-methyl-uridine-3'-phosphate
  modified_base 13: mod_base = OTHER; note = 2'-O-methyl-uridine-3'-phosphate
  modified_base 14: mod_base = OTHER; note = 2'-fluoro-guanosine-3'-phosphate
  modified_base 15: mod_base = OTHER; note = 2'-O-methyl-cytidine-3'-phosphate
  modified_base 16: mod_base = OTHER; note = 2'-fluoro-uridine-3'-phosphate
  modified_base 17: mod_base = OTHER; note = 2'-O-methyl-cytidine-3'-phosphate
  modified_base 18: mod_base = OTHER; note = 2'-fluoro-uridine-3'-phosphate
  modified_base 19: mod_base = OTHER; note = 2'-O-methyl-guanosine-3'-phosphate
  modified_base 20: mod_base = OTHER; note = 2'-O-methyl-guanosine-3'-phosphate
  modified_base 21: mod_base = OTHER; note = 2'-O-methyl-adenosine-3'-phosphate
ttgaagaactgttgctctgga

SEQ ID NO: 705 - RNA, 19 nt, synthetic construct
  source 1..19: mol_type = other RNA
cagagcaacagttcttcaa

SEQ ID NO: 706 - RNA, 21 nt, synthetic construct
  source 1..21: mol_type = other RNA
  modified_base 1: mod_base = OTHER; note = 2'-O-methyl-uridine-3'-phosphate
  modified_base 2: mod_base = OTHER; note = 2'-fluoro-uridine-3'-phosphate
  modified_base 3: mod_base = OTHER; note = 2'-O-methyl-guanosine-3'-phosphate
  modified_base 4: mod_base = OTHER; note = 2'-fluoro-adenosine-3'-phosphate
  modified_base 5: mod_base = OTHER; note = 2'-O-methyl-adenosine-3'-phosphate
  modified_base 6: mod_base = OTHER; note = 2'-fluoro-guanosine-3'-phosphate
  modified_base 7: mod_base = OTHER; note = 2'-O-methyl-adenosine-3'-phosphate
  modified_base 8: mod_base = OTHER; note = 2'-fluoro-adenosine-3'-phosphate
  modified_base 9: mod_base = OTHER; note = 2'-O-methyl-cytidine-3'-phosphate
  modified_base 10: mod_base = OTHER; note = 2'-O-methyl-uridine-3'-phosphate
  modified_base 11: mod_base = OTHER; note = 2'-O-methyl-guanosine-3'-phosphate
  modified_base 12: mod_base = OTHER; note = 2'-fluoro-uridine-3'-phosphate
  modified_base 13: mod_base = OTHER; note = 2'-O-methyl-uridine-3'-phosphate
  modified_base 14: mod_base = OTHER; note = 2'-O-methyl-guanosine-3'-phosphate
  modified_base 15: mod_base = OTHER; note = 2'-O-methyl-cytidine-3'-phosphate
  modified_base 16: mod_base = OTHER; note = 2'-fluoro-uridine-3'-phosphate
  modified_base 17: mod_base = OTHER; note = 2'-O-methyl-cytidine-3'-phosphate
  modified_base 18: mod_base = OTHER; note = 2'-fluoro-uridine-3'-phosphate
  modified_base 19: mod_base = OTHER; note = 2'-O-methyl-guanosine-3'-phosphate
  modified_base 20: mod_base = OTHER; note = 2'-O-methyl-guanosine-3'-phosphate
  modified_base 21: mod_base = OTHER; note = 2'-O-methyl-adenosine-3'-phosphate
ttgaagaactgttgctctgga

SEQ ID NO: 707 - RNA, 19 nt, synthetic construct
  source 1..19: mol_type = other RNA
cagagcaacagttcttcaa

SEQ ID NO: 708 - RNA, 21 nt, synthetic construct
  source 1..21: mol_type = other RNA
  modified_base 1: mod_base = OTHER; note = 2'-O-methyl-uridine-3'-phosphate
  modified_base 2: mod_base = OTHER; note = 2'-fluoro-uridine-3'-phosphate
  modified_base 3: mod_base = OTHER; note = 2'-O-methyl-guanosine-3'-phosphate
  modified_base 4: mod_base = OTHER; note = 2'-fluoro-adenosine-3'-phosphate
  modified_base 5: mod_base = OTHER; note = 2'-O-methyl-adenosine-3'-phosphate
  modified_base 6: mod_base = OTHER; note = 2'-fluoro-guanosine-3'-phosphate
  modified_base 7: mod_base = OTHER; note = 2'-O-methyl-adenosine-3'-phosphate
  modified_base 8: mod_base = OTHER; note = 2'-fluoro-adenosine-3'-phosphate
  modified_base 9: mod_base = OTHER; note = 2'-O-methyl-cytidine-3'-phosphate
  modified_base 10: mod_base = OTHER; note = 2'-O-methyl-uridine-3'-phosphate
  modified_base 11: mod_base = OTHER; note = 2'-O-methyl-guanosine-3'-phosphate
  modified_base 12: mod_base = OTHER; note = 2'-fluoro-uridine-3'-phosphate
  modified_base 13: mod_base = OTHER; note = 2'-O-methyl-uridine-3'-phosphate
  modified_base 14: mod_base = OTHER; note = 2'-fluoro-guanosine-3'-phosphate
  modified_base 15: mod_base = OTHER; note = 2'-O-methyl-cytidine-3'-phosphate
  modified_base 16: mod_base = OTHER; note = 2'-O-methyl-uridine-3'-phosphate
  modified_base 17: mod_base = OTHER; note = 2'-O-methyl-cytidine-3'-phosphate
  modified_base 18: mod_base = OTHER; note = 2'-fluoro-uridine-3'-phosphate
  modified_base 19: mod_base = OTHER; note = 2'-O-methyl-guanosine-3'-phosphate
  modified_base 20: mod_base = OTHER; note = 2'-O-methyl-guanosine-3'-phosphate
  modified_base 21: mod_base = OTHER; note = 2'-O-methyl-adenosine-3'-phosphate
ttgaagaactgttgctctgga

SEQ ID NO: 709 - RNA, 19 nt, synthetic construct
  source 1..19: mol_type = other RNA
cagagcaacagttcttcaa

SEQ ID NO: 710 - RNA, 21 nt, synthetic construct
  source 1..21: mol_type = other RNA
  modified_base 1: mod_base = OTHER; note = 2'-O-methyl-uridine-3'-phosphate
  modified_base 2: mod_base = OTHER; note = 2'-fluoro-uridine-3'-phosphate
  modified_base 3: mod_base = OTHER; note = 2'-O-methyl-guanosine-3'-phosphate
  modified_base 4: mod_base = OTHER; note = 2'-fluoro-adenosine-3'-phosphate
  modified_base 5: mod_base = OTHER; note = 2'-O-methyl-adenosine-3'-phosphate
  modified_base 6: mod_base = OTHER; note = 2'-fluoro-guanosine-3'-phosphate
  modified_base 7: mod_base = OTHER; note = 2'-O-methyl-adenosine-3'-phosphate
  modified_base 8: mod_base = OTHER; note = 2'-fluoro-adenosine-3'-phosphate
  modified_base 9: mod_base = OTHER; note = 2'-O-methyl-cytidine-3'-phosphate
  modified_base 10: mod_base = OTHER; note = 2'-O-methyl-uridine-3'-phosphate
  modified_base 11: mod_base = OTHER; note = 2'-O-methyl-guanosine-3'-phosphate
  modified_base 12: mod_base = OTHER; note = 2'-fluoro-uridine-3'-phosphate
  modified_base 13: mod_base = OTHER; note = 2'-O-methyl-uridine-3'-phosphate
  modified_base 14: mod_base = OTHER; note = 2'-fluoro-guanosine-3'-phosphate
  modified_base 15: mod_base = OTHER; note = 2'-O-methyl-cytidine-3'-phosphate
  modified_base 16: mod_base = OTHER; note = 2'-fluoro-uridine-3'-phosphate
  modified_base 17: mod_base = OTHER; note = 2'-O-methyl-cytidine-3'-phosphate
  modified_base 18: mod_base = OTHER; note = 2'-O-methyl-uridine-3'-phosphate
  modified_base 19: mod_base = OTHER; note = 2'-O-methyl-guanosine-3'-phosphate
  modified_base 20: mod_base = OTHER; note = 2'-O-methyl-guanosine-3'-phosphate
  modified_base 21: mod_base = OTHER; note = 2'-O-methyl-adenosine-3'-phosphate
ttgaagaactgttgctctgga

SEQ ID NO: 711 - RNA, 19 nt, synthetic construct
  source 1..19: mol_type = other RNA
cagagcaacagttcttcaa

SEQ ID NO: 712 - RNA, 21 nt, synthetic construct
  source 1..21: mol_type = other RNA
  modified_base 1: mod_base = OTHER; note = 2'-O-methyl-uridine-3'-thiophosphate-phosphate
  modified_base 2: mod_base = OTHER; note = 2'-fluoro-uridine-3'-phosphate
  modified_base 3: mod_base = OTHER; note = 2'-O-methyl-guanosine-3'-phosphate
  modified_base 4: mod_base = OTHER; note = 2'-fluoro-adenosine-3'-phosphate
  modified_base 5: mod_base = OTHER; note = 2'-O-methyl-adenosine-3'-phosphate
  modified_base 6: mod_base = OTHER; note = 2'-fluoro-guanosine-3'-phosphate
  modified_base 7: mod_base = OTHER; note = 2'-O-methyl-adenosine-3'-phosphate
  modified_base 8: mod_base = OTHER; note = 2'-fluoro-adenosine-3'-phosphate
  modified_base 9: mod_base = OTHER; note = 2'-O-methyl-cytidine-3'-phosphate
  modified_base 10: mod_base = OTHER; note = 2'-O-methyl-uridine-3'-phosphate
  modified_base 11: mod_base = OTHER; note = 2'-O-methyl-guanosine-3'-phosphate
  modified_base 12: mod_base = OTHER; note = 2'-fluoro-uridine-3'-phosphate
  modified_base 13: mod_base = OTHER; note = 2'-O-methyl-uridine-3'-phosphate
  modified_base 14: mod_base = OTHER; note = 2'-fluoro-guanosine-3'-phosphate
  modified_base 15: mod_base = OTHER; note = 2'-O-methyl-cytidine-3'-phosphate
  modified_base 16: mod_base = OTHER; note = 2'-fluoro-uridine-3'-phosphate
  modified_base 17: mod_base = OTHER; note = 2'-O-methyl-cytidine-3'-phosphate
  modified_base 18: mod_base = OTHER; note = 2'-fluoro-uridine-3'-phosphate
  modified_base 19: mod_base = OTHER; note = 2'-O-methyl-guanosine-3'-phosphate
  modified_base 20: mod_base = OTHER; note = 2'-O-methyl-guanosine-3'-thiophosphate-phosphate
  modified_base 21: mod_base = OTHER; note = 2'-O-methyl-adenosine-3'-phosphate
ttgaagaactgttgctctgga

SEQ ID NO: 713 - RNA, 19 nt, synthetic construct
  source 1..19: mol_type = other RNA
cagagcaacagttcttcaa

SEQ ID NO: 714 - RNA, 21 nt, synthetic construct
  source 1..21: mol_type = other RNA
  modified_base 1: mod_base = OTHER; note = 2'-O-methyl-uridine-3'-thiophosphate-phosphate
  modified_base 2: mod_base = OTHER; note = 2'-fluoro-uridine-3'-thiophosphate-phosphate
  modified_base 3: mod_base = OTHER; note = 2'-O-methyl-guanosine-3'-phosphate
  modified_base 4: mod_base = OTHER; note = 2'-fluoro-adenosine-3'-phosphate
  modified_base 5: mod_base = OTHER; note = 2'-O-methyl-adenosine-3'-phosphate
  modified_base 6: mod_base = OTHER; note = 2'-fluoro-guanosine-3'-phosphate
  modified_base 7: mod_base = OTHER; note = 2'-O-methyl-adenosine-3'-phosphate
  modified_base 8: mod_base = OTHER; note = 2'-fluoro-adenosine-3'-phosphate
  modified_base 9: mod_base = OTHER; note = 2'-O-methyl-cytidine-3'-phosphate
  modified_base 10: mod_base = OTHER; note = 2'-O-methyl-uridine-3'-phosphate
  modified_base 11: mod_base = OTHER; note = 2'-O-methyl-guanosine-3'-phosphate
  modified_base 12: mod_base = OTHER; note = 2'-fluoro-uridine-3'-phosphate
  modified_base 13: mod_base = OTHER; note = 2'-O-methyl-uridine-3'-phosphate
  modified_base 14: mod_base = OTHER; note = 2'-fluoro-guanosine-3'-phosphate
  modified_base 15: mod_base = OTHER; note = 2'-O-methyl-cytidine-3'-phosphate
  modified_base 16: mod_base = OTHER; note = 2'-fluoro-uridine-3'-phosphate
  modified_base 17: mod_base = OTHER; note = 2'-O-methyl-cytidine-3'-phosphate
  modified_base 18: mod_base = OTHER; note = 2'-fluoro-uridine-3'-phosphate
  modified_base 19: mod_base = OTHER; note = 2'-O-methyl-guanosine-3'-thiophosphate-phosphate
  modified_base 20: mod_base = OTHER; note = 2'-O-methyl-guanosine-3'-thiophosphate-phosphate
  modified_base 21: mod_base = OTHER; note = 2'-O-methyl-adenosine-3'-phosphate
ttgaagaactgttgctctgga

SEQ ID NO: 715 - RNA, 19 nt, synthetic construct
  source 1..19: mol_type = other RNA
cagagcaacagttcttcaa

SEQ ID NO: 716 - RNA, 21 nt, synthetic construct
  source 1..21: mol_type = other RNA
  modified_base 1: mod_base = OTHER; note = 2'-O-methyl-uridine-3'-phosphate
  modified_base 2: mod_base = OTHER; note = 2'-deoxy-thymine-3'-phosphate
  modified_base 3: mod_base = OTHER; note = 2'-O-methyl-guanosine-3'-phosphate
  modified_base 4: mod_base = OTHER; note = 2'-fluoro-adenosine-3'-phosphate
  modified_base 5: mod_base = OTHER; note = 2'-deoxy-adenosine-3'-phosphate
  modified_base 6: mod_base = OTHER; note = 2'-fluoro-guanosine-3'-phosphate
  modified_base 7: mod_base = OTHER; note = 2'-deoxy-adenosine-3'-phosphate
  modified_base 8: mod_base = OTHER; note = 2'-fluoro-adenosine-3'-phosphate
  modified_base 9: mod_base = OTHER; note = 2'-O-methyl-cytidine-3'-phosphate
  modified_base 10: mod_base = OTHER; note = 2'-O-methyl-uridine-3'-phosphate
  modified_base 11: mod_base = OTHER; note = 2'-O-methyl-guanosine-3'-phosphate
  modified_base 12: mod_base = OTHER; note = 2'-deoxy-thymine-3'-phosphate
  modified_base 13: mod_base = OTHER; note = 2'-O-methyl-uridine-3'-phosphate
  modified_base 14: mod_base = OTHER; note = 2'-fluoro-guanosine-3'-phosphate
  modified_base 15: mod_base = OTHER; note = 2'-O-methyl-cytidine-3'-phosphate
  modified_base 16: mod_base = OTHER; note = 2'-fluoro-uridine-3'-phosphate
  modified_base 17: mod_base = OTHER; note = 2'-O-methyl-cytidine-3'-phosphate
  modified_base 18: mod_base = OTHER; note = 2'-fluoro-uridine-3'-phosphate
  modified_base 19: mod_base = OTHER; note = 2'-O-methyl-guanosine-3'-phosphate
  modified_base 20: mod_base = OTHER; note = 2'-O-methyl-guanosine-3'-phosphate
  modified_base 21: mod_base = OTHER; note = 2'-O-methyl-adenosine-3'-phosphate
ttgaagaactgttgctctgga

SEQ ID NO: 717 - RNA, 19 nt, synthetic construct
  source 1..19: mol_type = other RNA
cagagcaacagttcttcaa

SEQ ID NO: 718 - RNA, 21 nt, synthetic construct
  source 1..21: mol_type = other RNA
  modified_base 1: mod_base = OTHER; note = 2'-O-methyl-uridine-3'-phosphate
  modified_base 2: mod_base = OTHER; note = 2'-fluoro-uridine-3'-phosphate
  modified_base 3: mod_base = OTHER; note = 2'-O-methyl-hypoxanthine-3'-phosphate
  modified_base 4: mod_base = OTHER; note = 2'-fluoro-adenosine-3'-phosphate
  modified_base 5: mod_base = OTHER; note = 2'-O-methyl-adenosine-3'-phosphate
  modified_base 6: mod_base = OTHER; note = 2'-fluoro-guanosine-3'-phosphate
  modified_base 7: mod_base = OTHER; note = 2'-O-methyl-adenosine-3'-phosphate
  modified_base 8: mod_base = OTHER; note = 2'-fluoro-adenosine-3'-phosphate
  modified_base 9: mod_base = OTHER; note = 2'-O-methyl-cytidine-3'-phosphate
  modified_base 10: mod_base = OTHER; note = 2'-O-methyl-uridine-3'-phosphate
  modified_base 11: mod_base = OTHER; note = 2'-O-methyl-guanosine-3'-phosphate
  modified_base 12: mod_base = OTHER; note = 2'-fluoro-uridine-3'-phosphate
  modified_base 13: mod_base = OTHER; note = 2'-O-methyl-uridine-3'-phosphate
  modified_base 14: mod_base = OTHER; note = 2'-fluoro-guanosine-3'-phosphate
  modified_base 15: mod_base = OTHER; note = 2'-O-methyl-cytidine-3'-phosphate
  modified_base 16: mod_base = OTHER; note = 2'-fluoro-uridine-3'-phosphate
  modified_base 17: mod_base = OTHER; note = 2'-O-methyl-cytidine-3'-phosphate
  modified_base 18: mod_base = OTHER; note = 2'-fluoro-uridine-3'-phosphate
  modified_base 19: mod_base = OTHER; note = 2'-O-methyl-guanosine-3'-phosphate
  modified_base 20: mod_base = OTHER; note = 2'-O-methyl-guanosine-3'-phosphate
  modified_base 21: mod_base = OTHER; note = 2'-O-methyl-adenosine-3'-phosphate
ttnaagaactgttgctctgga

SEQ ID NO: 719 - RNA, 19 nt, synthetic construct
  source 1..19: mol_type = other RNA
cagagcaacagttcttcaa

SEQ ID NO: 720 - RNA, 21 nt, synthetic construct
  source 1..21: mol_type = other RNA
  modified_base 1: mod_base = OTHER; note = 2'-O-methyl-uridine-3'-phosphate
  modified_base 2: mod_base = OTHER; note = 2'-fluoro-uridine-3'-phosphate
  modified_base 3: mod_base = OTHER; note = 2'-O-methyl-guanosine-3'-phosphate
  modified_base 4: mod_base = OTHER; note = 2'-fluoro-adenosine-3'-phosphate
  modified_base 5: mod_base = OTHER; note = 2'-O-methyl-adenosine-3'-phosphate
  modified_base 6: mod_base = OTHER; note = 2'-fluoro-hypoxanthine-3'-phosphate
  modified_base 7: mod_base = OTHER; note = 2'-O-methyl-adenosine-3'-phosphate
  modified_base 8: mod_base = OTHER; note = 2'-fluoro-adenosine-3'-phosphate
  modified_base 9: mod_base = OTHER; note = 2'-O-methyl-cytidine-3'-phosphate
  modified_base 10: mod_base = OTHER; note = 2'-O-methyl-uridine-3'-phosphate
  modified_base 11: mod_base = OTHER; note = 2'-O-methyl-guanosine-3'-phosphate
  modified_base 12: mod_base = OTHER; note = 2'-fluoro-uridine-3'-phosphate
  modified_base 13: mod_base = OTHER; note = 2'-O-methyl-uridine-3'-phosphate
  modified_base 14: mod_base = OTHER; note = 2'-fluoro-guanosine-3'-phosphate
  modified_base 15: mod_base = OTHER; note = 2'-O-methyl-cytidine-3'-phosphate
  modified_base 16: mod_base = OTHER; note = 2'-fluoro-uridine-3'-phosphate
  modified_base 17: mod_base = OTHER; note = 2'-O-methyl-cytidine-3'-phosphate
  modified_base 18: mod_base = OTHER; note = 2'-fluoro-uridine-3'-phosphate
  modified_base 19: mod_base = OTHER; note = 2'-O-methyl-guanosine-3'-phosphate
  modified_base 20: mod_base = OTHER; note = 2'-O-methyl-guanosine-3'-phosphate
  modified_base 21: mod_base = OTHER; note = 2'-O-methyl-adenosine-3'-phosphate
ttgaanaactgttgctctgga

SEQ ID NO: 721 - RNA, 19 nt, synthetic construct
  source 1..19: mol_type = other RNA
  modified_base 1: mod_base = OTHER; note = 2'-O-methyl-cytidine-3'-phosphate
  modified_base 2: mod_base = OTHER; note = 2'-O-methyl-adenosine-3'-phosphate
  modified_base 3: mod_base = OTHER; note = 2'-O-methyl-guanosine-3'-phosphate
  modified_base 4: mod_base = OTHER; note = 2'-O-methyl-adenosine-3'-phosphate
  modified_base 5: mod_base = OTHER; note = 2'-fluoro-guanosine-3'-phosphate
  modified_base 6: mod_base = OTHER; note = 2'-fluoro-cytidine-3'-phosphate
  modified_base 7: mod_base = OTHER; note = 2'-fluoro-adenosine-3'-phosphate
  modified_base 8: mod_base = OTHER; note = 2'-fluoro-adenosine-3'-phosphate
  modified_base 9: mod_base = OTHER; note = 2'-fluoro-cytidine-3'-phosphate
  modified_base 10: mod_base = OTHER; note = 2'-fluoro-adenosine-3'-phosphate
  modified_base 11: mod_base = OTHER; note = 2'-O-methyl-guanosine-3'-phosphate
  modified_base 12: mod_base = OTHER; note = 2'-O-methyl-uridine-3'-phosphate
  modified_base 13: mod_base = OTHER; note = 2'-O-methyl-uridine-3'-phosphate
  modified_base 14: mod_base = OTHER; note = 2'-O-methyl-cytidine-3'-phosphate
  modified_base 15: mod_base = OTHER; note = 2'-O-methyl-uridine-3'-phosphate
  modified_base 16: mod_base = OTHER; note = 2'-O-methyl-uridine-3'-phosphate
  modified_base 17: mod_base = OTHER; note = 2'-O-methyl-cytidine-3'-phosphate
  modified_base 18: mod_base = OTHER; note = 2'-O-methyl-adenosine-3'-phosphate
  modified_base 19: mod_base = OTHER; note = 2'-O-methyl-adenosine-3'-phosphate
cagagcaacagttcttcaa

SEQ ID NO: 722 - RNA, 21 nt, synthetic construct
  source 1..21: mol_type = other RNA
ttgaagaactgttgctctgga

SEQ ID NO: 723 - RNA, 19 nt, synthetic construct
  source 1..19: mol_type = other RNA
  modified_base 1: mod_base = OTHER; note = 2'-O-methyl-cytidine-3'-phosphate
  modified_base 2: mod_base = OTHER; note = 2'-O-methyl-adenosine-3'-phosphate
  modified_base 3: mod_base = OTHER; note = 2'-O-methyl-guanosine-3'-phosphate
  modified_base 4: mod_base = OTHER; note = 2'-O-methyl-adenosine-3'-phosphate
  modified_base 5: mod_base = OTHER; note = 2'-O-methyl-guanosine-3'-phosphate
  modified_base 6: mod_base = OTHER; note = 2'-fluoro-cytidine-3'-phosphate
  modified_base 7: mod_base = OTHER; note = 2'-fluoro-adenosine-3'-phosphate
  modified_base 8: mod_base = OTHER; note = 2'-fluoro-adenosine-3'-phosphate
  modified_base 9: mod_base = OTHER; note = 2'-fluoro-cytidine-3'-phosphate
  modified_base 10: mod_base = OTHER; note = 2'-fluoro-adenosine-3'-phosphate
  modified_base 11: mod_base = OTHER; note = 2'-O-methyl-guanosine-3'-phosphate
  modified_base 12: mod_base = OTHER; note = 2'-O-methyl-uridine-3'-phosphate
  modified_base 13: mod_base = OTHER; note = 2'-O-methyl-uridine-3'-phosphate
  modified_base 14: mod_base = OTHER; note = 2'-O-methyl-cytidine-3'-phosphate
  modified_base 15: mod_base = OTHER; note = 2'-O-methyl-uridine-3'-phosphate
  modified_base 16: mod_base = OTHER; note = 2'-O-methyl-uridine-3'-phosphate
  modified_base 17: mod_base = OTHER; note = 2'-O-methyl-cytidine-3'-phosphate
  modified_base 18: mod_base = OTHER; note = 2'-O-methyl-adenosine-3'-phosphate
  modified_base 19: mod_base = OTHER; note = 2'-O-methyl-adenosine-3'-phosphate
cagagcaacagttcttcaa

SEQ ID NO: 724 - RNA, 21 nt, synthetic construct
  source 1..21: mol_type = other RNA
ttgaagaactgttgctctgga

SEQ ID NO: 725 - RNA, 19 nt, synthetic construct
  source 1..19: mol_type = other RNA
  modified_base 1: mod_base = OTHER; note = 2'-O-methyl-cytidine-3'-phosphate
  modified_base 2: mod_base = OTHER; note = 2'-O-methyl-adenosine-3'-phosphate
  modified_base 3: mod_base = OTHER; note = 2'-O-methyl-guanosine-3'-phosphate
  modified_base 4: mod_base = OTHER; note = 2'-O-methyl-adenosine-3'-phosphate
  modified_base 5: mod_base = OTHER; note = 2'-O-methyl-guanosine-3'-phosphate
  modified_base 6: mod_base = OTHER; note = 2'-O-methyl-cytidine-3'-phosphate
  modified_base 7: mod_base = OTHER; note = 2'-fluoro-adenosine-3'-phosphate
  modified_base 8: mod_base = OTHER; note = 2'-fluoro-adenosine-3'-phosphate
  modified_base 9: mod_base = OTHER; note = 2'-fluoro-cytidine-3'-phosphate
  modified_base 10: mod_base = OTHER; note = 2'-fluoro-adenosine-3'-phosphate
  modified_base 11: mod_base = OTHER; note = 2'-O-methyl-guanosine-3'-phosphate
  modified_base 12: mod_base = OTHER; note = 2'-O-methyl-uridine-3'-phosphate
  modified_base 13: mod_base = OTHER; note = 2'-O-methyl-uridine-3'-phosphate
  modified_base 14: mod_base = OTHER; note = 2'-O-methyl-cytidine-3'-phosphate
  modified_base 15: mod_base = OTHER; note = 2'-O-methyl-uridine-3'-phosphate
  modified_base 16: mod_base = OTHER; note = 2'-O-methyl-uridine-3'-phosphate
  modified_base 17: mod_base = OTHER; note = 2'-O-methyl-cytidine-3'-phosphate
  modified_base 18: mod_base = OTHER; note = 2'-O-methyl-adenosine-3'-phosphate
  modified_base 19: mod_base = OTHER; note = 2'-O-methyl-adenosine-3'-phosphate
cagagcaacagttcttcaa

SEQ ID NO: 726 - RNA, 21 nt, synthetic construct
  source 1..21: mol_type = other RNA
ttgaagaactgttgctctgga

SEQ ID NO: 727 - RNA, 19 nt, synthetic construct
  source 1..19: mol_type = other RNA
  modified_base 1: mod_base = OTHER; note = 2'-O-methyl-cytidine-3'-phosphate
  modified_base 2: mod_base = OTHER; note = 2'-O-methyl-adenosine-3'-phosphate
  modified_base 3: mod_base = OTHER; note = 2'-O-methyl-guanosine-3'-phosphate
  modified_base 4: mod_base = OTHER; note = 2'-O-methyl-adenosine-3'-phosphate
  modified_base 5: mod_base = OTHER; note = 2'-O-methyl-guanosine-3'-phosphate
  modified_base 6: mod_base = OTHER; note = 2'-O-methyl-cytidine-3'-phosphate
  modified_base 7: mod_base = OTHER; note = 2'-O-methyl-adenosine-3'-phosphate
  modified_base 8: mod_base = OTHER; note = 2'-fluoro-adenosine-3'-phosphate
  modified_base 9: mod_base = OTHER; note = 2'-fluoro-cytidine-3'-phosphate
  modified_base 10: mod_base = OTHER; note = 2'-fluoro-adenosine-3'-phosphate
  modified_base 11: mod_base = OTHER; note = 2'-O-methyl-guanosine-3'-phosphate
  modified_base 12: mod_base = OTHER; note = 2'-O-methyl-uridine-3'-phosphate
  modified_base 13: mod_base = OTHER; note = 2'-O-methyl-uridine-3'-phosphate
  modified_base 14: mod_base = OTHER; note = 2'-O-methyl-cytidine-3'-phosphate
  modified_base 15: mod_base = OTHER; note = 2'-O-methyl-uridine-3'-phosphate
  modified_base 16: mod_base = OTHER; note = 2'-O-methyl-uridine-3'-phosphate
  modified_base 17: mod_base = OTHER; note = 2'-O-methyl-cytidine-3'-phosphate
  modified_base 18: mod_base = OTHER; note = 2'-O-methyl-adenosine-3'-phosphate
  modified_base 19: mod_base = OTHER; note = 2'-O-methyl-adenosine-3'-phosphate
cagagcaacagttcttcaa

SEQ ID NO: 728 - RNA, 21 nt, synthetic construct
  source 1..21: mol_type = other RNA
ttgaagaactgttgctctgga

SEQ ID NO: 729 - RNA, 19 nt, synthetic construct
  source 1..19: mol_type = other RNA
  modified_base 1: mod_base = OTHER; note = 2'-O-methyl-cytidine-3'-phosphate
  modified_base 2: mod_base = OTHER; note = 2'-O-methyl-adenosine-3'-phosphate
  modified_base 3: mod_base = OTHER; note = 2'-O-methyl-guanosine-3'-phosphate
  modified_base 4: mod_base = OTHER; note = 2'-O-methyl-adenosine-3'-phosphate
  modified_base 5: mod_base = OTHER; note = 2'-fluoro-guanosine-3'-phosphate
  modified_base 6: mod_base = OTHER; note = 2'-O-methyl-cytidine-3'-phosphate
  modified_base 7: mod_base = OTHER; note = 2'-O-methyl-adenosine-3'-phosphate
  modified_base 8: mod_base = OTHER; note = 2'-O-methyl-adenosine-3'-phosphate
  modified_base 9: mod_base = OTHER; note = 2'-fluoro-cytidine-3'-phosphate
  modified_base 10: mod_base = OTHER; note = 2'-fluoro-adenosine-3'-phosphate
  modified_base 11: mod_base = OTHER; note = 2'-O-methyl-guanosine-3'-phosphate
  modified_base 12: mod_base = OTHER; note = 2'-O-methyl-uridine-3'-phosphate
  modified_base 13: mod_base = OTHER; note = 2'-O-methyl-uridine-3'-phosphate
  modified_base 14: mod_base = OTHER; note = 2'-O-methyl-cytidine-3'-phosphate
  modified_base 15: mod_base = OTHER; note = 2'-O-methyl-uridine-3'-phosphate
  modified_base 16: mod_base = OTHER; note = 2'-O-methyl-uridine-3'-phosphate
  modified_base 17: mod_base = OTHER; note = 2'-O-methyl-cytidine-3'-phosphate
  modified_base 18: mod_base = OTHER; note = 2'-O-methyl-adenosine-3'-phosphate
  modified_base 19: mod_base = OTHER; note = 2'-O-methyl-adenosine-3'-phosphate
cagagcaacagttcttcaa

SEQ ID NO: 730 - RNA, 21 nt, synthetic construct
  source 1..21: mol_type = other RNA
ttgaagaactgttgctctgga

SEQ ID NO: 731 - RNA, 19 nt, synthetic construct
  source 1..19: mol_type = other RNA
  modified_base 1: mod_base = OTHER; note = 2'-O-methyl-cytidine-3'-phosphate
  modified_base 2: mod_base = OTHER; note = 2'-O-methyl-adenosine-3'-phosphate
  modified_base 3: mod_base = OTHER; note = 2'-O-methyl-guanosine-3'-phosphate
  modified_base 4: mod_base = OTHER; note = 2'-O-methyl-adenosine-3'-phosphate
  modified_base 5: mod_base = OTHER; note = 2'-fluoro-guanosine-3'-phosphate
  modified_base 6: mod_base = OTHER; note = 2'-fluoro-cytidine-3'-phosphate
  modified_base 7: mod_base = OTHER; note = 2'-O-methyl-adenosine-3'-phosphate
  modified_base 8: mod_base = OTHER; note = 2'-O-methyl-adenosine-3'-phosphate
  modified_base 9: mod_base = OTHER; note = 2'-O-methyl-cytidine-3'-phosphate
  modified_base 10: mod_base = OTHER; note = 2'-fluoro-adenosine-3'-phosphate
  modified_base 11: mod_base = OTHER; note = 2'-O-methyl-guanosine-3'-phosphate
  modified_base 12: mod_base = OTHER; note = 2'-O-methyl-uridine-3'-phosphate
  modified_base 13: mod_base = OTHER; note = 2'-O-methyl-uridine-3'-phosphate
  modified_base 14: mod_base = OTHER; note = 2'-O-methyl-cytidine-3'-phosphate
  modified_base 15: mod_base = OTHER; note = 2'-O-methyl-uridine-3'-phosphate
  modified_base 16: mod_base = OTHER; note = 2'-O-methyl-uridine-3'-phosphate
  modified_base 17: mod_base = OTHER; note = 2'-O-methyl-cytidine-3'-phosphate
  modified_base 18: mod_base = OTHER; note = 2'-O-methyl-adenosine-3'-phosphate
  modified_base 19: mod_base = OTHER; note = 2'-O-methyl-adenosine-3'-phosphate
cagagcaacagttcttcaa

SEQ ID NO: 732 - RNA, 21 nt, synthetic construct
  source 1..21: mol_type = other RNA
ttgaagaactgttgctctgga

SEQ ID NO: 733 - RNA, 19 nt, synthetic construct
  source 1..19: mol_type = other RNA
  modified_base 1: mod_base = OTHER; note = 2'-O-methyl-cytidine-3'-phosphate
  modified_base 2: mod_base = OTHER; note = 2'-O-methyl-adenosine-3'-phosphate
  modified_base 3: mod_base = OTHER; note = 2'-O-methyl-guanosine-3'-phosphate
  modified_base 4: mod_base = OTHER; note = 2'-O-methyl-adenosine-3'-phosphate
  modified_base 5: mod_base = OTHER; note = 2'-fluoro-guanosine-3'-phosphate
  modified_base 6: mod_base = OTHER; note = 2'-fluoro-cytidine-3'-phosphate
  modified_base 7: mod_base = OTHER; note = 2'-fluoro-adenosine-3'-phosphate
  modified_base 8: mod_base = OTHER; note = 2'-O-methyl-adenosine-3'-phosphate
  modified_base 9: mod_base = OTHER; note = 2'-O-methyl-cytidine-3'-phosphate
  modified_base 10: mod_base = OTHER; note = 2'-O-methyl-adenosine-3'-phosphate
  modified_base 11: mod_base = OTHER; note = 2'-O-methyl-guanosine-3'-phosphate
  modified_base 12: mod_base = OTHER; note = 2'-O-methyl-uridine-3'-phosphate
  modified_base 13: mod_base = OTHER; note = 2'-O-methyl-uridine-3'-phosphate
  modified_base 14: mod_base = OTHER; note = 2'-O-methyl-cytidine-3'-phosphate
  modified_base 15: mod_base = OTHER; note = 2'-O-methyl-uridine-3'-phosphate
  modified_base 16: mod_base = OTHER; note = 2'-O-methyl-uridine-3'-phosphate
  modified_base 17: mod_base = OTHER; note = 2'-O-methyl-cytidine-3'-phosphate
  modified_base 18: mod_base = OTHER; note = 2'-O-methyl-adenosine-3'-phosphate
  modified_base 19: mod_base = OTHER; note = 2'-O-methyl-adenosine-3'-phosphate
cagagcaacagttcttcaa

SEQ ID NO: 734 - RNA, 21 nt, synthetic construct
  source 1..21: mol_type = other RNA
ttgaagaactgttgctctgga

SEQ ID NO: 735 - RNA, 19 nt, synthetic construct
  source 1..19: mol_type = other RNA
  modified_base 1: mod_base = OTHER; note = 2'-O-methyl-cytidine-3'-phosphate
  modified_base 2: mod_base = OTHER; note = 2'-O-methyl-adenosine-3'-phosphate
  modified_base 3: mod_base = OTHER; note = 2'-O-methyl-guanosine-3'-phosphate
  modified_base 4: mod_base = OTHER; note = 2'-O-methyl-adenosine-3'-phosphate
  modified_base 5: mod_base = OTHER; note = 2'-fluoro-guanosine-3'-phosphate
  modified_base 6: mod_base = OTHER; note = 2'-fluoro-cytidine-3'-phosphate
  modified_base 7: mod_base = OTHER; note = 2'-fluoro-adenosine-3'-phosphate
  modified_base 8: mod_base = OTHER; note = 2'-fluoro-adenosine-3'-phosphate
  modified_base 9: mod_base = OTHER; note = 2'-O-methyl-cytidine-3'-phosphate
  modified_base 10: mod_base = OTHER; note = 2'-O-methyl-adenosine-3'-phosphate
  modified_base 11: mod_base = OTHER; note = 2'-O-methyl-guanosine-3'-phosphate
  modified_base 12: mod_base = OTHER; note = 2'-O-methyl-uridine-3'-phosphate
  modified_base 13: mod_base = OTHER; note = 2'-O-methyl-uridine-3'-phosphate
  modified_base 14: mod_base = OTHER; note = 2'-O-methyl-cytidine-3'-phosphate
  modified_base 15: mod_base = OTHER; note = 2'-O-methyl-uridine-3'-phosphate
  modified_base 16: mod_base = OTHER; note = 2'-O-methyl-uridine-3'-phosphate
  modified_base 17: mod_base = OTHER; note = 2'-O-methyl-cytidine-3'-phosphate
  modified_base 18: mod_base = OTHER; note = 2'-O-methyl-adenosine-3'-phosphate
  modified_base 19: mod_base = OTHER; note = 2'-O-methyl-adenosine-3'-phosphate
cagagcaacagttcttcaa

SEQ ID NO: 736 - RNA, 21 nt, synthetic construct
  source 1..21: mol_type = other RNA
ttgaagaactgttgctctgga

SEQ ID NO: 737 - RNA, 19 nt, synthetic construct
  source 1..19: mol_type = other RNA
  modified_base 1: mod_base = OTHER; note = 2'-O-methyl-cytidine-3'-phosphate
  modified_base 2: mod_base = OTHER; note = 2'-O-methyl-adenosine-3'-phosphate
  modified_base 3: mod_base = OTHER; note = 2'-O-methyl-guanosine-3'-phosphate
  modified_base 4: mod_base = OTHER; note = 2'-O-methyl-adenosine-3'-phosphate
  modified_base 5: mod_base = OTHER; note = 2'-fluoro-guanosine-3'-phosphate
  modified_base 6: mod_base = OTHER; note = 2'-fluoro-cytidine-3'-phosphate
  modified_base 7: mod_base = OTHER; note = 2'-fluoro-adenosine-3'-phosphate
  modified_base 8: mod_base = OTHER; note = 2'-fluoro-adenosine-3'-phosphate
  modified_base 9: mod_base = OTHER; note = 2'-fluoro-cytidine-3'-phosphate
  modified_base 10: mod_base = OTHER; note = 2'-O-methyl-adenosine-3'-phosphate
  modified_base 11: mod_base = OTHER; note = 2'-O-methyl-guanosine-3'-phosphate
  modified_base 12: mod_base = OTHER; note = 2'-O-methyl-uridine-3'-phosphate
  modified_base 13: mod_base = OTHER; note = 2'-O-methyl-uridine-3'-phosphate
  modified_base 14: mod_base = OTHER; note = 2'-O-methyl-cytidine-3'-phosphate
  modified_base 15: mod_base = OTHER; note = 2'-O-methyl-uridine-3'-phosphate
  modified_base 16: mod_base = OTHER; note = 2'-O-methyl-uridine-3'-phosphate
  modified_base 17: mod_base = OTHER; note = 2'-O-methyl-cytidine-3'-phosphate
  modified_base 18: mod_base = OTHER; note = 2'-O-methyl-adenosine-3'-phosphate
  modified_base 19: mod_base = OTHER; note = 2'-O-methyl-adenosine-3'-phosphate
cagagcaacagttcttcaa

SEQ ID NO: 738 - RNA, 21 nt, synthetic construct
  source 1..21: mol_type = other RNA
ttgaagaactgttgctctgga

SEQ ID NO: 739 - RNA, 19 nt, synthetic construct
  source 1..19: mol_type = other RNA
  modified_base 1: mod_base = OTHER; note = 2'-O-methyl-cytidine-3'-thiophosphate-phosphate
  modified_base 2: mod_base = OTHER; note = 2'-O-methyl-adenosine-3'-phosphate
  modified_base 3: mod_base = OTHER; note = 2'-O-methyl-guanosine-3'-phosphate
  modified_base 4: mod_base = OTHER; note = 2'-O-methyl-adenosine-3'-phosphate
  modified_base 5: mod_base = OTHER; note = 2'-fluoro-guanosine-3'-phosphate
  modified_base 6: mod_base = OTHER; note = 2'-fluoro-cytidine-3'-phosphate
  modified_base 7: mod_base = OTHER; note = 2'-fluoro-adenosine-3'-phosphate
  modified_base 8: mod_base = OTHER; note = 2'-fluoro-adenosine-3'-phosphate
  modified_base 9: mod_base = OTHER; note = 2'-fluoro-cytidine-3'-phosphate
  modified_base 10: mod_base = OTHER; note = 2'-fluoro-adenosine-3'-phosphate
  modified_base 11: mod_base = OTHER; note = 2'-O-methyl-guanosine-3'-phosphate
  modified_base 12: mod_base = OTHER; note = 2'-O-methyl-uridine-3'-phosphate
  modified_base 13: mod_base = OTHER; note = 2'-O-methyl-uridine-3'-phosphate
  modified_base 14: mod_base = OTHER; note = 2'-O-methyl-cytidine-3'-phosphate
  modified_base 15: mod_base = OTHER; note = 2'-O-methyl-uridine-3'-phosphate
  modified_base 16: mod_base = OTHER; note = 2'-O-methyl-uridine-3'-phosphate
  modified_base 17: mod_base = OTHER; note = 2'-O-methyl-cytidine-3'-phosphate
  modified_base 18: mod_base = OTHER; note = 2'-O-methyl-adenosine-3'-phosphate
  modified_base 19: mod_base = OTHER; note = 2'-O-methyl-adenosine-3'-phosphate
cagagcaacagttcttcaa

SEQ ID NO: 740 - RNA, 21 nt, synthetic construct
  source 1..21: mol_type = other RNA
ttgaagaactgttgctctgga

SEQ ID NO: 741 - RNA, 19 nt, synthetic construct
  source 1..19: mol_type = other RNA
  modified_base 1: mod_base = OTHER; note = 2'-O-methyl-cytidine-3'-thiophosphate-phosphate
  modified_base 2: mod_base = OTHER; note = 2'-O-methyl-adenosine-3'-thiophosphate-phosphate
  modified_base 3: mod_base = OTHER; note = 2'-O-methyl-guanosine-3'-phosphate
  modified_base 4: mod_base = OTHER; note = 2'-O-methyl-adenosine-3'-phosphate
  modified_base 5: mod_base = OTHER; note = 2'-fluoro-guanosine-3'-phosphate
  modified_base 6: mod_base = OTHER; note = 2'-fluoro-cytidine-3'-phosphate
  modified_base 7: mod_base = OTHER; note = 2'-fluoro-adenosine-3'-phosphate
  modified_base 8: mod_base = OTHER; note = 2'-fluoro-adenosine-3'-phosphate
  modified_base 9: mod_base = OTHER; note = 2'-fluoro-cytidine-3'-phosphate
  modified_base 10: mod_base = OTHER; note = 2'-fluoro-adenosine-3'-phosphate
  modified_base 11: mod_base = OTHER; note = 2'-O-methyl-guanosine-3'-phosphate
  modified_base 12: mod_base = OTHER; note = 2'-O-methyl-uridine-3'-phosphate
  modified_base 13: mod_base = OTHER; note = 2'-O-methyl-uridine-3'-phosphate
  modified_base 14: mod_base = OTHER; note = 2'-O-methyl-cytidine-3'-phosphate
  modified_base 15: mod_base = OTHER; note = 2'-O-methyl-uridine-3'-phosphate
  modified_base 16: mod_base = OTHER; note = 2'-O-methyl-uridine-3'-phosphate
  modified_base 17: mod_base = OTHER; note = 2'-O-methyl-cytidine-3'-phosphate
  modified_base 18: mod_base = OTHER; note = 2'-O-methyl-adenosine-3'-phosphate
  modified_base 19: mod_base = OTHER; note = 2'-O-methyl-adenosine-3'-phosphate
cagagcaacagttcttcaa

SEQ ID NO: 742 - RNA, 21 nt, synthetic construct
  source 1..21: mol_type = other RNA
ttgaagaactgttgctctgga

SEQ ID NO: 743 - RNA, 19 nt, synthetic construct
  source 1..19: mol_type = other RNA
  modified_base 1: mod_base = OTHER; note = 2'-O-methyl-cytidine-3'-thiophosphate-phosphate
  modified_base 2: mod_base = OTHER; note = 2'-O-methyl-adenosine-3'-thiophosphate-phosphate
  modified_base 3: mod_base = OTHER; note = 2'-O-methyl-guanosine-3'-phosphate
  modified_base 4: mod_base = OTHER; note = 2'-O-methyl-adenosine-3'-phosphate
  modified_base 5: mod_base = OTHER; note = 2'-fluoro-guanosine-3'-phosphate
  modified_base 6: mod_base = OTHER; note = 2'-fluoro-cytidine-3'-phosphate
  modified_base 7: mod_base = OTHER; note = 2'-fluoro-adenosine-3'-phosphate
  modified_base 8: mod_base = OTHER; note = 2'-fluoro-adenosine-3'-phosphate
  modified_base 9: mod_base = OTHER; note = 2'-fluoro-cytidine-3'-phosphate
  modified_base 10: mod_base = OTHER; note = 2'-fluoro-adenosine-3'-phosphate
  modified_base 11: mod_base = OTHER; note = 2'-O-methyl-guanosine-3'-phosphate
  modified_base 12: mod_base = OTHER; note = 2'-O-methyl-uridine-3'-phosphate
  modified_base 13: mod_base = OTHER; note = 2'-O-methyl-uridine-3'-phosphate
  modified_base 14: mod_base = OTHER; note = 2'-O-methyl-cytidine-3'-phosphate
  modified_base 15: mod_base = OTHER; note = 2'-O-methyl-uridine-3'-phosphate
  modified_base 16: mod_base = OTHER; note = 2'-O-methyl-uridine-3'-phosphate
  modified_base 17: mod_base = OTHER; note = 2'-O-methyl-cytidine-3'-phosphate
  modified_base 18: mod_base = OTHER; note = 2'-O-methyl-adenosine-3'-phosphate
  modified_base 19: mod_base = OTHER; note = 2'-O-methyl-adenosine-3'-phosphate
cagagcaacagttcttcaa

SEQ ID NO: 744 - RNA, 21 nt, synthetic construct
  source 1..21: mol_type = other RNA
  modified_base 1: mod_base = OTHER; note = 2'-O-methyl-uridine-3'-thiophosphate-phosphate
  modified_base 2: mod_base = OTHER; note = 2'-fluoro-uridine-3'-thiophosphate-phosphate
  modified_base 3: mod_base = OTHER; note = 2'-O-methyl-guanosine-3'-phosphate
  modified_base 4: mod_base = OTHER; note = 2'-fluoro-adenosine-3'-phosphate
  modified_base 5: mod_base = OTHER; note = 2'-O-methyl-adenosine-3'-phosphate
  modified_base 6: mod_base = OTHER; note = 2'-fluoro-guanosine-3'-phosphate
  modified_base 7: mod_base = OTHER; note = 2'-O-methyl-adenosine-3'-phosphate
  modified_base 8: mod_base = OTHER; note = 2'-fluoro-adenosine-3'-phosphate
  modified_base 9: mod_base = OTHER; note = 2'-O-methyl-cytidine-3'-phosphate
  modified_base 10: mod_base = OTHER; note = 2'-O-methyl-uridine-3'-phosphate
  modified_base 11: mod_base = OTHER; note = 2'-O-methyl-guanosine-3'-phosphate
  modified_base 12: mod_base = OTHER; note = 2'-fluoro-uridine-3'-phosphate
  modified_base 13: mod_base = OTHER; note = 2'-O-methyl-uridine-3'-phosphate
  modified_base 14: mod_base = OTHER; note = 2'-fluoro-guanosine-3'-phosphate
  modified_base 15: mod_base = OTHER; note = 2'-O-methyl-cytidine-3'-phosphate
  modified_base 16: mod_base = OTHER; note = 2'-fluoro-uridine-3'-phosphate
  modified_base 17: mod_base = OTHER; note = 2'-O-methyl-cytidine-3'-phosphate
  modified_base 18: mod_base = OTHER; note = 2'-fluoro-uridine-3'-phosphate
  modified_base 19: mod_base = OTHER; note = 2'-O-methyl-guanosine-3'-thiophosphate-phosphate
  modified_base 20: mod_base = OTHER; note = 2'-O-methyl-guanosine-3'-thiophosphate-phosphate
  modified_base 21: mod_base = OTHER; note = 2'-O-methyl-adenosine-3'-phosphate
ttgaagaactgttgctctgga

SEQ ID NO: 745 - RNA, 19 nt, synthetic construct
  source 1..19: mol_type = other RNA
agtcaaagctattttcata

SEQ ID NO: 746 - RNA, 21 nt, synthetic construct
  source 1..21: mol_type = other RNA
  modified_base 1: mod_base = OTHER; note = 2'-O-methyl-uridine-3'-phosphate
  modified_base 2: mod_base = OTHER; note = 2'-fluoro-adenosine-3'-phosphate
  modified_base 3: mod_base = OTHER; note = 2'-O-methyl-uridine-3'-phosphate
  modified_base 4: mod_base = OTHER; note = 2'-fluoro-guanosine-3'-phosphate
  modified_base 5: mod_base = OTHER; note = 2'-O-methyl-adenosine-3'-phosphate
  modified_base 6: mod_base = OTHER; note = 2'-fluoro-adenosine-3'-phosphate
  modified_base 7: mod_base = OTHER; note = 2'-O-methyl-adenosine-3'-phosphate
  modified_base 8: mod_base = OTHER; note = 2'-fluoro-adenosine-3'-phosphate
  modified_base 9: mod_base = OTHER; note = 2'-O-methyl-uridine-3'-phosphate
  modified_base 10: mod_base = OTHER; note = 2'-O-methyl-adenosine-3'-phosphate
  modified_base 11: mod_base = OTHER; note = 2'-O-methyl-guanosine-3'-phosphate
  modified_base 12: mod_base = OTHER; note = 2'-fluoro-cytidine-3'-phosphate
  modified_base 13: mod_base = OTHER; note = 2'-O-methyl-uridine-3'-phosphate
  modified_base 14: mod_base = OTHER; note = 2'-fluoro-uridine-3'-phosphate
  modified_base 15: mod_base = OTHER; note = 2'-O-methyl-uridine-3'-phosphate
  modified_base 16: mod_base = OTHER; note = 2'-fluoro-guanosine-3'-phosphate
  modified_base 17: mod_base = OTHER; note = 2'-O-methyl-adenosine-3'-phosphate
  modified_base 18: mod_base = OTHER; note = 2'-fluoro-cytidine-3'-phosphate
  modified_base 19: mod_base = OTHER; note = 2'-O-methyl-guanosine-3'-phosphate
  modified_base 20: mod_base = OTHER; note = 2'-O-methyl-uridine-3'-phosphate
  modified_base 21: mod_base = OTHER; note = 2'-O-methyl-uridine-3'-phosphate
tatgaaaatagctttgacgtt

SEQ ID NO: 747 - RNA, 19 nt, synthetic construct
  source 1..19: mol_type = other RNA
agtcaaagctattttcata

SEQ ID NO: 748 - RNA, 21 nt, synthetic construct
  source 1..21: mol_type = other RNA
  modified_base 1: mod_base = OTHER; note = 2'-O-methyl-uridine-3'-phosphate
  modified_base 2: mod_base = OTHER; note = 2'-fluoro-adenosine-3'-phosphate
  modified_base 3: mod_base = OTHER; note = 2'-O-methyl-uridine-3'-phosphate
  modified_base 4: mod_base = OTHER; note = 2'-fluoro-guanosine-3'-phosphate
  modified_base 5: mod_base = OTHER; note = 2'-O-methyl-adenosine-3'-phosphate
  modified_base 6: mod_base = OTHER; note = 2'-fluoro-adenosine-3'-phosphate
  modified_base 7: mod_base = OTHER; note = 2'-O-methyl-adenosine-3'-phosphate
  modified_base 8: mod_base = OTHER; note = 2'-fluoro-adenosine-3'-phosphate
  modified_base 9: mod_base = OTHER; note = 2'-fluoro-uridine-3'-phosphate
  modified_base 10: mod_base = OTHER; note = 2'-O-methyl-adenosine-3'-phosphate
  modified_base 11: mod_base = OTHER; note = 2'-O-methyl-guanosine-3'-phosphate
  modified_base 12: mod_base = OTHER; note = 2'-fluoro-cytidine-3'-phosphate
  modified_base 13: mod_base = OTHER; note = 2'-O-methyl-uridine-3'-phosphate
  modified_base 14: mod_base = OTHER; note = 2'-fluoro-uridine-3'-phosphate
  modified_base 15: mod_base = OTHER; note = 2'-O-methyl-uridine-3'-phosphate
  modified_base 16: mod_base = OTHER; note = 2'-fluoro-guanosine-3'-phosphate
  modified_base 17: mod_base = OTHER; note = 2'-O-methyl-adenosine-3'-phosphate
  modified_base 18: mod_base = OTHER; note = 2'-fluoro-cytidine-3'-phosphate
  modified_base 19: mod_base = OTHER; note = 2'-O-methyl-guanosine-3'-phosphate
  modified_base 20: mod_base = OTHER; note = 2'-O-methyl-uridine-3'-phosphate
  modified_base 21: mod_base = OTHER; note = 2'-O-methyl-uridine-3'-phosphate
tatgaaaatagctttgacgtt

SEQ ID NO: 749 - RNA, 19 nt, synthetic construct
  source 1..19: mol_type = other RNA
agtcaaagctattttcata

SEQ ID NO: 750 - RNA, 21 nt, synthetic construct
  source 1..21: mol_type = other RNA
  modified_base 1: mod_base = OTHER; note = 2'-O-methyl-uridine-3'-phosphate
  modified_base 2: mod_base = OTHER; note = 2'-fluoro-adenosine-3'-phosphate
  modified_base 3: mod_base = OTHER; note = 2'-O-methyl-uridine-3'-phosphate
  modified_base 4: mod_base = OTHER; note = 2'-fluoro-guanosine-3'-phosphate
  modified_base 5: mod_base = OTHER; note = 2'-O-methyl-adenosine-3'-phosphate
  modified_base 6: mod_base = OTHER; note = 2'-fluoro-adenosine-3'-phosphate
  modified_base 7: mod_base = OTHER; note = 2'-O-methyl-adenosine-3'-phosphate
  modified_base 8: mod_base = OTHER; note = 2'-fluoro-adenosine-3'-phosphate
  modified_base 9: mod_base = OTHER; note = 2'-O-methyl-uridine-3'-phosphate
  modified_base 10: mod_base = OTHER; note = 2'-fluoro-adenosine-3'-phosphate
  modified_base 11: mod_base = OTHER; note = 2'-O-methyl-guanosine-3'-phosphate
  modified_base 12: mod_base = OTHER; note = 2'-fluoro-cytidine-3'-phosphate
  modified_base 13: mod_base = OTHER; note = 2'-O-methyl-uridine-3'-phosphate
  modified_base 14: mod_base = OTHER; note = 2'-fluoro-uridine-3'-phosphate
  modified_base 15: mod_base = OTHER; note = 2'-O-methyl-uridine-3'-phosphate
  modified_base 16: mod_base = OTHER; note = 2'-fluoro-guanosine-3'-phosphate
  modified_base 17: mod_base = OTHER; note = 2'-O-methyl-adenosine-3'-phosphate
  modified_base 18: mod_base = OTHER; note = 2'-fluoro-cytidine-3'-phosphate
  modified_base 19: mod_base = OTHER; note = 2'-O-methyl-guanosine-3'-phosphate
  modified_base 20: mod_base = OTHER; note = 2'-O-methyl-uridine-3'-phosphate
  modified_base 21: mod_base = OTHER; note = 2'-O-methyl-uridine-3'-phosphate
tatgaaaatagctttgacgtt

SEQ ID NO: 751 - RNA, 19 nt, synthetic construct
  source 1..19: mol_type = other RNA
agtcaaagctattttcata

SEQ ID NO: 752 - RNA, 21 nt, synthetic construct
  source 1..21: mol_type = other RNA
  modified_base 1: mod_base = OTHER; note = 2'-O-methyl-uridine-3'-phosphate
  modified_base 2: mod_base = OTHER; note = 2'-fluoro-adenosine-3'-phosphate
  modified_base 3: mod_base = OTHER; note = 2'-O-methyl-uridine-3'-phosphate
  modified_base 4: mod_base = OTHER; note = 2'-fluoro-guanosine-3'-phosphate
  modified_base 5: mod_base = OTHER; note = 2'-O-methyl-adenosine-3'-phosphate
  modified_base 6: mod_base = OTHER; note = 2'-fluoro-adenosine-3'-phosphate
  modified_base 7: mod_base = OTHER; note = 2'-O-methyl-adenosine-3'-phosphate
  modified_base 8: mod_base = OTHER; note = 2'-fluoro-adenosine-3'-phosphate
  modified_base 9: mod_base = OTHER; note = 2'-O-methyl-uridine-3'-phosphate
  modified_base 10: mod_base = OTHER; note = 2'-O-methyl-adenosine-3'-phosphate
  modified_base 11: mod_base = OTHER; note = 2'-fluoro-guanosine-3'-phosphate
  modified_base 12: mod_base = OTHER; note = 2'-fluoro-cytidine-3'-phosphate
  modified_base 13: mod_base = OTHER; note = 2'-O-methyl-uridine-3'-phosphate
  modified_base 14: mod_base = OTHER; note = 2'-fluoro-uridine-3'-phosphate
  modified_base 15: mod_base = OTHER; note = 2'-O-methyl-uridine-3'-phosphate
  modified_base 16: mod_base = OTHER; note = 2'-fluoro-guanosine-3'-phosphate
  modified_base 17: mod_base = OTHER; note = 2'-O-methyl-adenosine-3'-phosphate
  modified_base 18: mod_base = OTHER; note = 2'-fluoro-cytidine-3'-phosphate
  modified_base 19: mod_base = OTHER; note = 2'-O-methyl-guanosine-3'-phosphate
  modified_base 20: mod_base = OTHER; note = 2'-O-methyl-uridine-3'-phosphate
  modified_base 21: mod_base = OTHER; note = 2'-O-methyl-uridine-3'-phosphate
tatgaaaatagctttgacgtt

SEQ ID NO: 753 - RNA, 19 nt, synthetic construct
  source 1..19: mol_type = other RNA
agtcaaagctattttcata

SEQ ID NO: 754 - RNA, 21 nt, synthetic construct
  source 1..21: mol_type = other RNA
  modified_base 1: mod_base = OTHER; note = 2'-O-methyl-uridine-3'-phosphate
  modified_base 2: mod_base = OTHER; note = 2'-O-methyl-adenosine-3'-phosphate
  modified_base 3: mod_base = OTHER; note = 2'-O-methyl-uridine-3'-phosphate
  modified_base 4: mod_base = OTHER; note = 2'-fluoro-guanosine-3'-phosphate
  modified_base 5: mod_base = OTHER; note = 2'-O-methyl-adenosine-3'-phosphate
  modified_base 6: mod_base = OTHER; note = 2'-fluoro-adenosine-3'-phosphate
  modified_base 7: mod_base = OTHER; note = 2'-O-methyl-adenosine-3'-phosphate
  modified_base 8: mod_base = OTHER; note = 2'-fluoro-adenosine-3'-phosphate
  modified_base 9: mod_base = OTHER; note = 2'-O-methyl-uridine-3'-phosphate
  modified_base 10: mod_base = OTHER; note = 2'-O-methyl-adenosine-3'-phosphate
  modified_base 11: mod_base = OTHER; note = 2'-O-methyl-guanosine-3'-phosphate
  modified_base 12: mod_base = OTHER; note = 2'-fluoro-cytidine-3'-phosphate
  modified_base 13: mod_base = OTHER; note = 2'-O-methyl-uridine-3'-phosphate
  modified_base 14: mod_base = OTHER; note = 2'-fluoro-uridine-3'-phosphate
  modified_base 15: mod_base = OTHER; note = 2'-O-methyl-uridine-3'-phosphate
  modified_base 16: mod_base = OTHER; note = 2'-fluoro-guanosine-3'-phosphate
  modified_base 17: mod_base = OTHER; note = 2'-O-methyl-adenosine-3'-phosphate
  modified_base 18: mod_base = OTHER; note = 2'-fluoro-cytidine-3'-phosphate
  modified_base 19: mod_base = OTHER; note = 2'-O-methyl-guanosine-3'-phosphate
  modified_base 20: mod_base = OTHER; note = 2'-O-methyl-uridine-3'-phosphate
  modified_base 21: mod_base = OTHER; note = 2'-O-methyl-uridine-3'-phosphate
tatgaaaatagctttgacgtt

SEQ ID NO: 755 - RNA, 19 nt, synthetic construct
  source 1..19: mol_type = other RNA
agtcaaagctattttcata

SEQ ID NO: 756 - RNA, 21 nt, synthetic construct
  source 1..21: mol_type = other RNA
  modified_base 1: mod_base = OTHER; note = 2'-O-methyl-uridine-3'-phosphate
  modified_base 2: mod_base = OTHER; note = 2'-fluoro-adenosine-3'-phosphate
  modified_base 3: mod_base = OTHER; note = 2'-O-methyl-uridine-3'-phosphate
  modified_base 4: mod_base = OTHER; note = 2'-O-methyl-guanosine-3'-phosphate
  modified_base 5: mod_base = OTHER; note = 2'-O-methyl-adenosine-3'-phosphate
  modified_base 6: mod_base = OTHER; note = 2'-fluoro-adenosine-3'-phosphate
  modified_base 7: mod_base = OTHER; note = 2'-O-methyl-adenosine-3'-phosphate
  modified_base 8: mod_base = OTHER; note = 2'-fluoro-adenosine-3'-phosphate
  modified_base 9: mod_base = OTHER; note = 2'-O-methyl-uridine-3'-phosphate
  modified_base 10: mod_base = OTHER; note = 2'-O-methyl-adenosine-3'-phosphate
  modified_base 11: mod_base = OTHER; note = 2'-O-methyl-guanosine-3'-phosphate
  modified_base 12: mod_base = OTHER; note = 2'-fluoro-cytidine-3'-phosphate
  modified_base 13: mod_base = OTHER; note = 2'-O-methyl-uridine-3'-phosphate
  modified_base 14: mod_base = OTHER; note = 2'-fluoro-uridine-3'-phosphate
  modified_base 15: mod_base = OTHER; note = 2'-O-methyl-uridine-3'-phosphate
  modified_base 16: mod_base = OTHER; note = 2'-fluoro-guanosine-3'-phosphate
  modified_base 17: mod_base = OTHER; note = 2'-O-methyl-adenosine-3'-phosphate
  modified_base 18: mod_base = OTHER; note = 2'-fluoro-cytidine-3'-phosphate
  modified_base 19: mod_base = OTHER; note = 2'-O-methyl-guanosine-3'-phosphate
  modified_base 20: mod_base = OTHER; note = 2'-O-methyl-uridine-3'-phosphate
  modified_base 21: mod_base = OTHER; note = 2'-O-methyl-uridine-3'-phosphate
tatgaaaatagctttgacgtt

SEQ ID NO: 757 - RNA, 19 nt, synthetic construct
  source 1..19: mol_type = other RNA
agtcaaagctattttcata

SEQ ID NO: 758 - RNA, 21 nt, synthetic construct
  source 1..21: mol_type = other RNA
  modified_base 1: mod_base = OTHER; note = 2'-O-methyl-uridine-3'-phosphate
  modified_base 2: mod_base = OTHER; note = 2'-fluoro-adenosine-3'-phosphate
  modified_base 3: mod_base = OTHER; note = 2'-O-methyl-uridine-3'-phosphate
  modified_base 4: mod_base = OTHER; note = 2'-fluoro-guanosine-3'-phosphate
  modified_base 5: mod_base = OTHER; note = 2'-O-methyl-adenosine-3'-phosphate
  modified_base 6: mod_base = OTHER; note = 2'-O-methyl-adenosine-3'-phosphate
  modified_base 7: mod_base = OTHER; note = 2'-O-methyl-adenosine-3'-phosphate
  modified_base 8: mod_base = OTHER; note = 2'-fluoro-adenosine-3'-phosphate
  modified_base 9: mod_base = OTHER; note = 2'-O-methyl-uridine-3'-phosphate
  modified_base 10: mod_base = OTHER; note = 2'-O-methyl-adenosine-3'-phosphate
  modified_base 11: mod_base = OTHER; note = 2'-O-methyl-guanosine-3'-phosphate
  modified_base 12: mod_base = OTHER; note = 2'-fluoro-cytidine-3'-phosphate
  modified_base 13: mod_base = OTHER; note = 2'-O-methyl-uridine-3'-phosphate
  modified_base 14: mod_base = OTHER; note = 2'-fluoro-uridine-3'-phosphate
  modified_base 15: mod_base = OTHER; note = 2'-O-methyl-uridine-3'-phosphate
  modified_base 16: mod_base = OTHER; note = 2'-fluoro-guanosine-3'-phosphate
  modified_base 17: mod_base = OTHER; note = 2'-O-methyl-adenosine-3'-phosphate
  modified_base 18: mod_base = OTHER; note = 2'-fluoro-cytidine-3'-phosphate
  modified_base 19: mod_base = OTHER; note = 2'-O-methyl-guanosine-3'-phosphate
  modified_base 20: mod_base = OTHER; note = 2'-O-methyl-uridine-3'-phosphate
  modified_base 21: mod_base = OTHER; note = 2'-O-methyl-uridine-3'-phosphate
tatgaaaatagctttgacgtt

SEQ ID NO: 759 - RNA, 19 nt, synthetic construct
  source 1..19: mol_type = other RNA
agtcaaagctattttcata

SEQ ID NO: 760 - RNA, 21 nt, synthetic construct
  source 1..21: mol_type = other RNA
  modified_base 1: mod_base = OTHER; note = 2'-O-methyl-uridine-3'-phosphate
  modified_base 2: mod_base = OTHER; note = 2'-fluoro-adenosine-3'-phosphate
  modified_base 3: mod_base = OTHER; note = 2'-O-methyl-uridine-3'-phosphate
  modified_base 4: mod_base = OTHER; note = 2'-fluoro-guanosine-3'-phosphate
  modified_base 5: mod_base = OTHER; note = 2'-O-methyl-adenosine-3'-phosphate
  modified_base 6: mod_base = OTHER; note = 2'-fluoro-adenosine-3'-phosphate
  modified_base 7: mod_base = OTHER; note = 2'-O-methyl-adenosine-3'-phosphate
  modified_base 8: mod_base = OTHER; note = 2'-O-methyl-adenosine-3'-phosphate
  modified_base 9: mod_base = OTHER; note = 2'-O-methyl-uridine-3'-phosphate
  modified_base 10: mod_base = OTHER; note = 2'-O-methyl-adenosine-3'-phosphate
  modified_base 11: mod_base = OTHER; note = 2'-O-methyl-guanosine-3'-phosphate
  modified_base 12: mod_base = OTHER; note = 2'-fluoro-cytidine-3'-phosphate
  modified_base 13: mod_base = OTHER; note = 2'-O-methyl-uridine-3'-phosphate
  modified_base 14: mod_base = OTHER; note = 2'-fluoro-uridine-3'-phosphate
  modified_base 15: mod_base = OTHER; note = 2'-O-methyl-uridine-3'-phosphate
  modified_base 16: mod_base = OTHER; note = 2'-fluoro-guanosine-3'-phosphate
  modified_base 17: mod_base = OTHER; note = 2'-O-methyl-adenosine-3'-phosphate
  modified_base 18: mod_base = OTHER; note = 2'-fluoro-cytidine-3'-phosphate
  modified_base 19: mod_base = OTHER; note = 2'-O-methyl-guanosine-3'-phosphate
  modified_base 20: mod_base = OTHER; note = 2'-O-methyl-uridine-3'-phosphate
  modified_base 21: mod_base = OTHER; note = 2'-O-methyl-uridine-3'-phosphate
tatgaaaatagctttgacgtt

SEQ ID NO: 761 - RNA, 19 nt, synthetic construct
  source 1..19: mol_type = other RNA
agtcaaagctattttcata

SEQ ID NO: 762 - RNA, 21 nt, synthetic construct
  source 1..21: mol_type = other RNA
  modified_base 1: mod_base = OTHER; note = 2'-O-methyl-uridine-3'-phosphate
  modified_base 2: mod_base = OTHER; note = 2'-fluoro-adenosine-3'-phosphate
  modified_base 3: mod_base = OTHER; note = 2'-O-methyl-uridine-3'-phosphate
  modified_base 4: mod_base = OTHER; note = 2'-fluoro-guanosine-3'-phosphate
  modified_base 5: mod_base = OTHER; note = 2'-O-methyl-adenosine-3'-phosphate
  modified_base 6: mod_base = OTHER; note = 2'-fluoro-adenosine-3'-phosphate
  modified_base 7: mod_base = OTHER; note = 2'-O-methyl-adenosine-3'-phosphate
  modified_base 8: mod_base = OTHER; note = 2'-fluoro-adenosine-3'-phosphate
  modified_base 9: mod_base = OTHER; note = 2'-O-methyl-uridine-3'-phosphate
  modified_base 10: mod_base = OTHER; note = 2'-O-methyl-adenosine-3'-phosphate
  modified_base 11: mod_base = OTHER; note = 2'-O-methyl-guanosine-3'-phosphate
  modified_base 12: mod_base = OTHER; note = 2'-O-methyl-cytidine-3'-phosphate
  modified_base 13: mod_base = OTHER; note = 2'-O-methyl-uridine-3'-phosphate
  modified_base 14: mod_base = OTHER; note = 2'-fluoro-uridine-3'-phosphate
  modified_base 15: mod_base = OTHER; note = 2'-O-methyl-uridine-3'-phosphate
  modified_base 16: mod_base = OTHER; note = 2'-fluoro-guanosine-3'-phosphate
  modified_base 17: mod_base = OTHER; note = 2'-O-methyl-adenosine-3'-phosphate
  modified_base 18: mod_base = OTHER; note = 2'-fluoro-cytidine-3'-phosphate
  modified_base 19: mod_base = OTHER; note = 2'-O-methyl-guanosine-3'-phosphate
  modified_base 20: mod_base = OTHER; note = 2'-O-methyl-uridine-3'-phosphate
  modified_base 21: mod_base = OTHER; note = 2'-O-methyl-uridine-3'-phosphate
tatgaaaatagctttgacgtt

SEQ ID NO: 763 - RNA, 19 nt, synthetic construct
  source 1..19: mol_type = other RNA
agtcaaagctattttcata

SEQ ID NO: 764 - RNA, 21 nt, synthetic construct
  source 1..21: mol_type = other RNA
  modified_base 1: mod_base = OTHER; note = 2'-O-methyl-uridine-3'-phosphate
  modified_base 2: mod_base = OTHER; note = 2'-fluoro-adenosine-3'-phosphate
  modified_base 3: mod_base = OTHER; note = 2'-O-methyl-uridine-3'-phosphate
  modified_base 4: mod_base = OTHER; note = 2'-fluoro-guanosine-3'-phosphate
  modified_base 5: mod_base = OTHER; note = 2'-O-methyl-adenosine-3'-phosphate
  modified_base 6: mod_base = OTHER; note = 2'-fluoro-adenosine-3'-phosphate
  modified_base 7: mod_base = OTHER; note = 2'-O-methyl-adenosine-3'-phosphate
  modified_base 8: mod_base = OTHER; note = 2'-fluoro-adenosine-3'-phosphate
  modified_base 9: mod_base = OTHER; note = 2'-O-methyl-uridine-3'-phosphate
  modified_base 10: mod_base = OTHER; note = 2'-O-methyl-adenosine-3'-phosphate
  modified_base 11: mod_base = OTHER; note = 2'-O-methyl-guanosine-3'-phosphate
  modified_base 12: mod_base = OTHER; note = 2'-fluoro-cytidine-3'-phosphate
  modified_base 13: mod_base = OTHER; note = 2'-O-methyl-uridine-3'-phosphate
  modified_base 14: mod_base = OTHER; note = 2'-O-methyl-uridine-3'-phosphate
  modified_base 15: mod_base = OTHER; note = 2'-O-methyl-uridine-3'-phosphate
  modified_base 16: mod_base = OTHER; note = 2'-fluoro-guanosine-3'-phosphate
  modified_base 17: mod_base = OTHER; note = 2'-O-methyl-adenosine-3'-phosphate
  modified_base 18: mod_base = OTHER; note = 2'-fluoro-cytidine-3'-phosphate
  modified_base 19: mod_base = OTHER; note = 2'-O-methyl-guanosine-3'-phosphate
  modified_base 20: mod_base = OTHER; note = 2'-O-methyl-uridine-3'-phosphate
  modified_base 21: mod_base = OTHER; note = 2'-O-methyl-uridine-3'-phosphate
tatgaaaatagctttgacgtt

SEQ ID NO: 765 - RNA, 19 nt, synthetic construct
  source 1..19: mol_type = other RNA
agtcaaagctattttcata

SEQ ID NO: 766 - RNA, 21 nt, synthetic construct
  source 1..21: mol_type = other RNA
  modified_base 1: mod_base = OTHER; note = 2'-O-methyl-uridine-3'-phosphate
  modified_base 2: mod_base = OTHER; note = 2'-fluoro-adenosine-3'-phosphate
  modified_base 3: mod_base = OTHER; note = 2'-O-methyl-uridine-3'-phosphate
  modified_base 4: mod_base = OTHER; note = 2'-fluoro-guanosine-3'-phosphate
  modified_base 5: mod_base = OTHER; note = 2'-O-methyl-adenosine-3'-phosphate
  modified_base 6: mod_base = OTHER; note = 2'-fluoro-adenosine-3'-phosphate
  modified_base 7: mod_base = OTHER; note = 2'-O-methyl-adenosine-3'-phosphate
  modified_base 8: mod_base = OTHER; note = 2'-fluoro-adenosine-3'-phosphate
  modified_base 9: mod_base = OTHER; note = 2'-O-methyl-uridine-3'-phosphate
  modified_base 10: mod_base = OTHER; note = 2'-O-methyl-adenosine-3'-phosphate
  modified_base 11: mod_base = OTHER; note = 2'-O-methyl-guanosine-3'-phosphate
  modified_base 12: mod_base = OTHER; note = 2'-fluoro-cytidine-3'-phosphate
  modified_base 13: mod_base = OTHER; note = 2'-O-methyl-uridine-3'-phosphate
  modified_base 14: mod_base = OTHER; note = 2'-fluoro-uridine-3'-phosphate
  modified_base 15: mod_base = OTHER; note = 2'-O-methyl-uridine-3'-phosphate
  modified_base 16: mod_base = OTHER; note = 2'-O-methyl-guanosine-3'-phosphate
  modified_base 17: mod_base = OTHER; note = 2'-O-methyl-adenosine-3'-phosphate
  modified_base 18: mod_base = OTHER; note = 2'-fluoro-cytidine-3'-phosphate
  modified_base 19: mod_base = OTHER; note = 2'-O-methyl-guanosine-3'-phosphate
  modified_base 20: mod_base = OTHER; note = 2'-O-methyl-uridine-3'-phosphate
  modified_base 21: mod_base = OTHER; note = 2'-O-methyl-uridine-3'-phosphate
tatgaaaatagctttgacgtt

SEQ ID NO: 767 - RNA, 19 nt, synthetic construct
  source 1..19: mol_type = other RNA
agtcaaagctattttcata

SEQ ID NO: 768 - RNA, 21 nt, synthetic construct
  source 1..21: mol_type = other RNA
  modified_base 1: mod_base = OTHER; note = 2'-O-methyl-uridine-3'-phosphate
  modified_base 2: mod_base = OTHER; note = 2'-fluoro-adenosine-3'-phosphate
  modified_base 3: mod_base = OTHER; note = 2'-O-methyl-uridine-3'-phosphate
  modified_base 4: mod_base = OTHER; note = 2'-fluoro-guanosine-3'-phosphate
  modified_base 5: mod_base = OTHER; note = 2'-O-methyl-adenosine-3'-phosphate
  modified_base 6: mod_base = OTHER; note = 2'-fluoro-adenosine-3'-phosphate
  modified_base 7: mod_base = OTHER; note = 2'-O-methyl-adenosine-3'-phosphate
  modified_base 8: mod_base = OTHER; note = 2'-fluoro-adenosine-3'-phosphate
  modified_base 9: mod_base = OTHER; note = 2'-O-methyl-uridine-3'-phosphate
  modified_base 10: mod_base = OTHER; note = 2'-O-methyl-adenosine-3'-phosphate
  modified_base 11: mod_base = OTHER; note = 2'-O-methyl-guanosine-3'-phosphate
  modified_base 12: mod_base = OTHER; note = 2'-fluoro-cytidine-3'-phosphate
  modified_base 13: mod_base = OTHER; note = 2'-O-methyl-uridine-3'-phosphate
  modified_base 14: mod_base = OTHER; note = 2'-fluoro-uridine-3'-phosphate
  modified_base 15: mod_base = OTHER; note = 2'-O-methyl-uridine-3'-phosphate
  modified_base 16: mod_base = OTHER; note = 2'-fluoro-guanosine-3'-phosphate
  modified_base 17: mod_base = OTHER; note = 2'-O-methyl-adenosine-3'-phosphate
  modified_base 18: mod_base = OTHER; note = 2'-O-methyl-cytidine-3'-phosphate
  modified_base 19: mod_base = OTHER; note = 2'-O-methyl-guanosine-3'-phosphate
  modified_base 20: mod_base = OTHER; note = 2'-O-methyl-uridine-3'-phosphate
  modified_base 21: mod_base = OTHER; note = 2'-O-methyl-uridine-3'-phosphate
tatgaaaatagctttgacgtt

SEQ ID NO: 769 - RNA, 19 nt, synthetic construct
  source 1..19: mol_type = other RNA
agtcaaagctattttcata

SEQ ID NO: 770 - RNA, 21 nt, synthetic construct
  source 1..21: mol_type = other RNA
  modified_base 1: mod_base = OTHER; note = 2'-O-methyl-uridine-3'-thiophosphate-phosphate
  modified_base 2: mod_base = OTHER; note = 2'-fluoro-adenosine-3'-phosphate
  modified_base 3: mod_base = OTHER; note = 2'-O-methyl-uridine-3'-phosphate
  modified_base 4: mod_base = OTHER; note = 2'-fluoro-guanosine-3'-phosphate
  modified_base 5: mod_base = OTHER; note = 2'-O-methyl-adenosine-3'-phosphate
  modified_base 6: mod_base = OTHER; note = 2'-fluoro-adenosine-3'-phosphate
  modified_base 7: mod_base = OTHER; note = 2'-O-methyl-adenosine-3'-phosphate
  modified_base 8: mod_base = OTHER; note = 2'-fluoro-adenosine-3'-phosphate
  modified_base 9: mod_base = OTHER; note = 2'-O-methyl-uridine-3'-phosphate
  modified_base 10: mod_base = OTHER; note = 2'-O-methyl-adenosine-3'-phosphate
  modified_base 11: mod_base = OTHER; note = 2'-O-methyl-guanosine-3'-phosphate
  modified_base 12: mod_base = OTHER; note = 2'-fluoro-cytidine-3'-phosphate
  modified_base 13: mod_base = OTHER; note = 2'-O-methyl-uridine-3'-phosphate
  modified_base 14: mod_base = OTHER; note = 2'-fluoro-uridine-3'-phosphate
  modified_base 15: mod_base = OTHER; note = 2'-O-methyl-uridine-3'-phosphate
  modified_base 16: mod_base = OTHER; note = 2'-fluoro-guanosine-3'-phosphate
  modified_base 17: mod_base = OTHER; note = 2'-O-methyl-adenosine-3'-phosphate
  modified_base 18: mod_base = OTHER; note = 2'-fluoro-cytidine-3'-phosphate
  modified_base 19: mod_base = OTHER; note = 2'-O-methyl-guanosine-3'-phosphate
  modified_base 20: mod_base = OTHER; note = 2'-O-methyl-uridine-3'-thiophosphate-phosphate
  modified_base 21: mod_base = OTHER; note = 2'-O-methyl-uridine-3'-phosphate
tatgaaaatagctttgacgtt

SEQ ID NO: 771 - RNA, 19 nt, synthetic construct
  source 1..19: mol_type = other RNA
agtcaaagctattttcata

SEQ ID NO: 772 - RNA, 21 nt, synthetic construct
  source 1..21: mol_type = other RNA
  modified_base 1: mod_base = OTHER; note = 2'-O-methyl-uridine-3'-thiophosphate-phosphate
  modified_base 2: mod_base = OTHER; note = 2'-fluoro-adenosine-3'-thiophosphate-phosphate
  modified_base 3: mod_base = OTHER; note = 2'-O-methyl-uridine-3'-phosphate
  modified_base 4: mod_base = OTHER; note = 2'-fluoro-guanosine-3'-phosphate
  modified_base 5: mod_base = OTHER; note = 2'-O-methyl-adenosine-3'-phosphate
  modified_base 6: mod_base = OTHER; note = 2'-fluoro-adenosine-3'-phosphate
  modified_base 7: mod_base = OTHER; note = 2'-O-methyl-adenosine-3'-phosphate
  modified_base 8: mod_base = OTHER; note = 2'-fluoro-adenosine-3'-phosphate
  modified_base 9: mod_base = OTHER; note = 2'-O-methyl-uridine-3'-phosphate
  modified_base 10: mod_base = OTHER; note = 2'-O-methyl-adenosine-3'-phosphate
  modified_base 11: mod_base = OTHER; note = 2'-O-methyl-guanosine-3'-phosphate
  modified_base 12: mod_base = OTHER; note = 2'-fluoro-cytidine-3'-phosphate
  modified_base 13: mod_base = OTHER; note = 2'-O-methyl-uridine-3'-phosphate
  modified_base 14: mod_base = OTHER; note = 2'-fluoro-uridine-3'-phosphate
  modified_base 15: mod_base = OTHER; note = 2'-O-methyl-uridine-3'-phosphate
  modified_base 16: mod_base = OTHER; note = 2'-fluoro-guanosine-3'-phosphate
  modified_base 17: mod_base = OTHER; note = 2'-O-methyl-adenosine-3'-phosphate
  modified_base 18: mod_base = OTHER; note = 2'-fluoro-cytidine-3'-phosphate
  modified_base 19: mod_base = OTHER; note = 2'-O-methyl-guanosine-3'-thiophosphate-phosphate
  modified_base 20: mod_base = OTHER; note = 2'-O-methyl-uridine-3'-thiophosphate-phosphate
  modified_base 21: mod_base = OTHER; note = 2'-O-methyl-uridine-3'-phosphate
tatgaaaatagctttgacgtt

SEQ ID NO: 773 - RNA, 19 nt, synthetic construct
  source 1..19: mol_type = other RNA
agtcaaagctattttcata

SEQ ID NO: 774 - RNA, 21 nt, synthetic construct
  source 1..21: mol_type = other RNA
  modified_base 1: mod_base = OTHER; note = 2'-O-methyl-uridine-3'-phosphate
  modified_base 2: mod_base = OTHER; note = 2'-deoxy-adenosine-3'-phosphate
  modified_base 3: mod_base = OTHER; note = 2'-O-methyl-uridine-3'-phosphate
  modified_base 4: mod_base = OTHER; note = 2'-fluoro-guanosine-3'-phosphate
  modified_base 5: mod_base = OTHER; note = 2'-deoxy-adenosine-3'-phosphate
  modified_base 6: mod_base = OTHER; note = 2'-fluoro-adenosine-3'-phosphate
  modified_base 7: mod_base = OTHER; note = 2'-deoxy-adenosine-3'-phosphate
  modified_base 8: mod_base = OTHER; note = 2'-fluoro-adenosine-3'-phosphate
  modified_base 9: mod_base = OTHER; note = 2'-O-methyl-uridine-3'-phosphate
  modified_base 10: mod_base = OTHER; note = 2'-O-methyl-adenosine-3'-phosphate
  modified_base 11: mod_base = OTHER; note = 2'-O-methyl-guanosine-3'-phosphate
  modified_base 12: mod_base = OTHER; note = 2'-deoxy-cytidine-3'-phosphate
  modified_base 13: mod_base = OTHER; note = 2'-O-methyl-uridine-3'-phosphate
  modified_base 14: mod_base = OTHER; note = 2'-fluoro-uridine-3'-phosphate
  modified_base 15: mod_base = OTHER; note = 2'-O-methyl-uridine-3'-phosphate
  modified_base 16: mod_base = OTHER; note = 2'-fluoro-guanosine-3'-phosphate
  modified_base 17: mod_base = OTHER; note = 2'-O-methyl-adenosine-3'-phosphate
  modified_base 18: mod_base = OTHER; note = 2'-fluoro-cytidine-3'-phosphate
  modified_base 19: mod_base = OTHER; note = 2'-O-methyl-guanosine-3'-phosphate
  modified_base 20: mod_base = OTHER; note = 2'-O-methyl-uridine-3'-phosphate
  modified_base 21: mod_base = OTHER; note = 2'-O-methyl-uridine-3'-phosphate
tatgaaaatagctttgacgtt

SEQ ID NO: 775 - RNA, 19 nt, synthetic construct
  source 1..19: mol_type = other RNA
agtcaaagctattttcata

SEQ ID NO: 776 - RNA, 21 nt, synthetic construct
  source 1..21: mol_type = other RNA
  modified_base 1: mod_base = OTHER; note = 2'-O-methyl-uridine-3'-phosphate
  modified_base 2: mod_base = OTHER; note = 2'-fluoro-adenosine-3'-phosphate
  modified_base 3: mod_base = OTHER; note = 2'-O-methyl-uridine-3'-phosphate
  modified_base 4: mod_base = OTHER; note = 2'-fluoro-hypoxanthine-3'-phosphate
  modified_base 5: mod_base = OTHER; note = 2'-O-methyl-adenosine-3'-phosphate
  modified_base 6: mod_base = OTHER; note = 2'-fluoro-adenosine-3'-phosphate
  modified_base 7: mod_base = OTHER; note = 2'-O-methyl-adenosine-3'-phosphate
  modified_base 8: mod_base = OTHER; note = 2'-fluoro-adenosine-3'-phosphate
  modified_base 9: mod_base = OTHER; note = 2'-O-methyl-uridine-3'-phosphate
  modified_base 10: mod_base = OTHER; note = 2'-O-methyl-adenosine-3'-phosphate
  modified_base 11: mod_base = OTHER; note = 2'-O-methyl-guanosine-3'-phosphate
  modified_base 12: mod_base = OTHER; note = 2'-fluoro-cytidine-3'-phosphate
  modified_base 13: mod_base = OTHER; note = 2'-O-methyl-uridine-3'-phosphate
  modified_base 14: mod_base = OTHER; note = 2'-fluoro-uridine-3'-phosphate
  modified_base 15: mod_base = OTHER; note = 2'-O-methyl-uridine-3'-phosphate
  modified_base 16: mod_base = OTHER; note = 2'-fluoro-guanosine-3'-phosphate
  modified_base 17: mod_base = OTHER; note = 2'-O-methyl-adenosine-3'-phosphate
  modified_base 18: mod_base = OTHER; note = 2'-fluoro-cytidine-3'-phosphate
  modified_base 19: mod_base = OTHER; note = 2'-O-methyl-guanosine-3'-phosphate
  modified_base 20: mod_base = OTHER; note = 2'-O-methyl-uridine-3'-phosphate
  modified_base 21: mod_base = OTHER; note = 2'-O-methyl-uridine-3'-phosphate
tatnaaaatagctttgacgtt

SEQ ID NO: 777 - RNA, 19 nt, synthetic construct
  source 1..19: mol_type = other RNA
  modified_base 1: mod_base = OTHER; note = 2'-O-methyl-adenosine-3'-phosphate
  modified_base 2: mod_base = OTHER; note = 2'-O-methyl-guanosine-3'-phosphate
  modified_base 3: mod_base = OTHER; note = 2'-O-methyl-uridine-3'-phosphate
  modified_base 4: mod_base = OTHER; note = 2'-O-methyl-cytidine-3'-phosphate
  modified_base 5: mod_base = OTHER; note = 2'-fluoro-adenosine-3'-phosphate
  modified_base 6: mod_base = OTHER; note = 2'-fluoro-adenosine-3'-phosphate
  modified_base 7: mod_base = OTHER; note = 2'-fluoro-adenosine-3'-phosphate
  modified_base 8: mod_base = OTHER; note = 2'-fluoro-guanosine-3'-phosphate
  modified_base 9: mod_base = OTHER; note = 2'-fluoro-cytidine-3'-phosphate
  modified_base 10: mod_base = OTHER; note = 2'-fluoro-uridine-3'-phosphate
  modified_base 11: mod_base = OTHER; note = 2'-O-methyl-adenosine-3'-phosphate
  modified_base 12: mod_base = OTHER; note = 2'-O-methyl-uridine-3'-phosphate
  modified_base 13: mod_base = OTHER; note = 2'-O-methyl-uridine-3'-phosphate
  modified_base 14: mod_base = OTHER; note = 2'-O-methyl-uridine-3'-phosphate
  modified_base 15: mod_base = OTHER; note = 2'-O-methyl-uridine-3'-phosphate
  modified_base 16: mod_base = OTHER; note = 2'-O-methyl-cytidine-3'-phosphate
  modified_base 17: mod_base = OTHER; note = 2'-O-methyl-adenosine-3'-phosphate
  modified_base 18: mod_base = OTHER; note = 2'-O-methyl-uridine-3'-phosphate
  modified_base 19: mod_base = OTHER; note = 2'-O-methyl-adenosine-3'-phosphate
agtcaaagctattttcata

SEQ ID NO: 778 - RNA, 21 nt, synthetic construct
  source 1..21: mol_type = other RNA
tatgaaaatagctttgacttt

SEQ ID NO: 779 - RNA, 19 nt, synthetic construct
  source 1..19: mol_type = other RNA
  modified_base 1: mod_base = OTHER; note = 2'-O-methyl-adenosine-3'-phosphate
  modified_base 2: mod_base = OTHER; note = 2'-O-methyl-guanosine-3'-phosphate
  modified_base 3: mod_base = OTHER; note = 2'-O-methyl-uridine-3'-phosphate
  modified_base 4: mod_base = OTHER; note = 2'-O-methyl-cytidine-3'-phosphate
  modified_base 5: mod_base = OTHER; note = 2'-O-methyl-adenosine-3'-phosphate
  modified_base 6: mod_base = OTHER; note = 2'-fluoro-adenosine-3'-phosphate
  modified_base 7: mod_base = OTHER; note = 2'-fluoro-adenosine-3'-phosphate
  modified_base 8: mod_base = OTHER; note = 2'-fluoro-guanosine-3'-phosphate
  modified_base 9: mod_base = OTHER; note = 2'-fluoro-cytidine-3'-phosphate
  modified_base 10: mod_base = OTHER; note = 2'-fluoro-uridine-3'-phosphate
  modified_base 11: mod_base = OTHER; note = 2'-O-methyl-adenosine-3'-phosphate
  modified_base 12: mod_base = OTHER; note = 2'-O-methyl-uridine-3'-phosphate
  modified_base 13: mod_base = OTHER; note = 2'-O-methyl-uridine-3'-phosphate
  modified_base 14: mod_base = OTHER; note = 2'-O-methyl-uridine-3'-phosphate
  modified_base 15: mod_base = OTHER; note = 2'-O-methyl-uridine-3'-phosphate
  modified_base 16: mod_base = OTHER; note = 2'-O-methyl-cytidine-3'-phosphate
  modified_base 17: mod_base = OTHER; note = 2'-O-methyl-adenosine-3'-phosphate
  modified_base 18: mod_base = OTHER; note = 2'-O-methyl-uridine-3'-phosphate
  modified_base 19: mod_base = OTHER; note = 2'-O-methyl-adenosine-3'-phosphate
agtcaaagctattttcata

SEQ ID NO: 780 - RNA, 21 nt, synthetic construct
  source 1..21: mol_type = other RNA
tatgaaaatagctttgacttt

SEQ ID NO: 781 - RNA, 19 nt, synthetic construct
  source 1..19: mol_type = other RNA
  modified_base 1: mod_base = OTHER; note = 2'-O-methyl-adenosine-3'-phosphate
  modified_base 2: mod_base = OTHER; note = 2'-O-methyl-guanosine-3'-phosphate
  modified_base 3: mod_base = OTHER; note = 2'-O-methyl-uridine-3'-phosphate
  modified_base 4: mod_base = OTHER; note = 2'-O-methyl-cytidine-3'-phosphate
  modified_base 5: mod_base = OTHER; note = 2'-O-methyl-adenosine-3'-phosphate
  modified_base 6: mod_base = OTHER; note = 2'-O-methyl-adenosine-3'-phosphate
  modified_base 7: mod_base = OTHER; note = 2'-fluoro-adenosine-3'-phosphate
  modified_base 8: mod_base = OTHER; note = 2'-fluoro-guanosine-3'-phosphate
  modified_base 9: mod_base = OTHER; note = 2'-fluoro-cytidine-3'-phosphate
  modified_base 10: mod_base = OTHER; note = 2'-fluoro-uridine-3'-phosphate
  modified_base 11: mod_base = OTHER; note = 2'-O-methyl-adenosine-3'-phosphate
  modified_base 12: mod_base = OTHER; note = 2'-O-methyl-uridine-3'-phosphate
  modified_base 13: mod_base = OTHER; note = 2'-O-methyl-uridine-3'-phosphate
  modified_base 14: mod_base = OTHER; note = 2'-O-methyl-uridine-3'-phosphate
  modified_base 15: mod_base = OTHER; note = 2'-O-methyl-uridine-3'-phosphate
  modified_base 16: mod_base = OTHER; note = 2'-O-methyl-cytidine-3'-phosphate
  modified_base 17: mod_base = OTHER; note = 2'-O-methyl-adenosine-3'-phosphate
  modified_base 18: mod_base = OTHER; note = 2'-O-methyl-uridine-3'-phosphate
  modified_base 19: mod_base = OTHER; note = 2'-O-methyl-adenosine-3'-phosphate
agtcaaagctattttcata

SEQ ID NO: 782 - RNA, 21 nt, synthetic construct
  source 1..21: mol_type = other RNA
tatgaaaatagctttgacttt

SEQ ID NO: 783 - RNA, 19 nt, synthetic construct
  source 1..19: mol_type = other RNA
  modified_base 1: mod_base = OTHER; note = 2'-O-methyl-adenosine-3'-phosphate
  modified_base 2: mod_base = OTHER; note = 2'-O-methyl-guanosine-3'-phosphate
  modified_base 3: mod_base = OTHER; note = 2'-O-methyl-uridine-3'-phosphate
  modified_base 4: mod_base = OTHER; note = 2'-O-methyl-cytidine-3'-phosphate
  modified_base 5: mod_base = OTHER; note = 2'-O-methyl-adenosine-3'-phosphate
  modified_base 6: mod_base = OTHER; note = 2'-O-methyl-adenosine-3'-phosphate
  modified_base 7: mod_base = OTHER; note = 2'-O-methyl-adenosine-3'-phosphate
  modified_base 8: mod_base = OTHER; note = 2'-fluoro-guanosine-3'-phosphate
  modified_base 9: mod_base = OTHER; note = 2'-fluoro-cytidine-3'-phosphate
  modified_base 10: mod_base = OTHER; note = 2'-fluoro-uridine-3'-phosphate
  modified_base 11: mod_base = OTHER; note = 2'-O-methyl-adenosine-3'-phosphate
  modified_base 12: mod_base = OTHER; note = 2'-O-methyl-uridine-3'-phosphate
  modified_base 13: mod_base = OTHER; note = 2'-O-methyl-uridine-3'-phosphate
  modified_base 14: mod_base = OTHER; note = 2'-O-methyl-uridine-3'-phosphate
  modified_base 15: mod_base = OTHER; note = 2'-O-methyl-uridine-3'-phosphate
  modified_base 16: mod_base = OTHER; note = 2'-O-methyl-cytidine-3'-phosphate
  modified_base 17: mod_base = OTHER; note = 2'-O-methyl-adenosine-3'-phosphate
  modified_base 18: mod_base = OTHER; note = 2'-O-methyl-uridine-3'-phosphate
  modified_base 19: mod_base = OTHER; note = 2'-O-methyl-adenosine-3'-phosphate
agtcaaagctattttcata

SEQ ID NO: 784 - RNA, 21 nt, synthetic construct
  source 1..21: mol_type = other RNA
tatgaaaatagctttgacttt

SEQ ID NO: 785 - RNA, 19 nt, synthetic construct
  source 1..19: mol_type = other RNA
  modified_base 1: mod_base = OTHER; note = 2'-O-methyl-adenosine-3'-phosphate
  modified_base 2: mod_base = OTHER; note = 2'-O-methyl-guanosine-3'-phosphate
  modified_base 3: mod_base = OTHER; note = 2'-O-methyl-uridine-3'-phosphate
  modified_base 4: mod_base = OTHER; note = 2'-O-methyl-cytidine-3'-phosphate
  modified_base 5: mod_base = OTHER; note = 2'-fluoro-adenosine-3'-phosphate
  modified_base 6: mod_base = OTHER; note = 2'-O-methyl-adenosine-3'-phosphate
  modified_base 7: mod_base = OTHER; note = 2'-O-methyl-adenosine-3'-phosphate
  modified_base 8: mod_base = OTHER; note = 2'-O-methyl-guanosine-3'-phosphate
  modified_base 9: mod_base = OTHER; note = 2'-fluoro-cytidine-3'-phosphate
  modified_base 10: mod_base = OTHER; note = 2'-fluoro-uridine-3'-phosphate
  modified_base 11: mod_base = OTHER; note = 2'-O-methyl-adenosine-3'-phosphate
  modified_base 12: mod_base = OTHER; note = 2'-O-methyl-uridine-3'-phosphate
  modified_base 13: mod_base = OTHER; note = 2'-O-methyl-uridine-3'-phosphate
  modified_base 14: mod_base = OTHER; note = 2'-O-methyl-uridine-3'-phosphate
  modified_base 15: mod_base = OTHER; note = 2'-O-methyl-uridine-3'-phosphate
  modified_base 16: mod_base = OTHER; note = 2'-O-methyl-cytidine-3'-phosphate
  modified_base 17: mod_base = OTHER; note = 2'-O-methyl-adenosine-3'-phosphate
  modified_base 18: mod_base = OTHER; note = 2'-O-methyl-uridine-3'-phosphate
  modified_base 19: mod_base = OTHER; note = 2'-O-methyl-adenosine-3'-phosphate
agtcaaagctattttcata

SEQ ID NO: 786 - RNA, 21 nt, synthetic construct
  source 1..21: mol_type = other RNA
tatgaaaatagctttgacttt

SEQ ID NO: 787 - RNA, 19 nt, synthetic construct
  source 1..19: mol_type = other RNA
  modified_base 1: mod_base = OTHER; note = 2'-O-methyl-adenosine-3'-phosphate
  modified_base 2: mod_base = OTHER; note = 2'-O-methyl-guanosine-3'-phosphate
  modified_base 3: mod_base = OTHER; note = 2'-O-methyl-uridine-3'-phosphate
  modified_base 4: mod_base = OTHER; note = 2'-O-methyl-cytidine-3'-phosphate
  modified_base 5: mod_base = OTHER; note = 2'-fluoro-adenosine-3'-phosphate
  modified_base 6: mod_base = OTHER; note = 2'-fluoro-adenosine-3'-phosphate
  modified_base 7: mod_base = OTHER; note = 2'-O-methyl-adenosine-3'-phosphate
  modified_base 8: mod_base = OTHER; note = 2'-O-methyl-guanosine-3'-phosphate
  modified_base 9: mod_base = OTHER; note = 2'-O-methyl-cytidine-3'-phosphate
  modified_base 10: mod_base = OTHER; note = 2'-fluoro-uridine-3'-phosphate
  modified_base 11: mod_base = OTHER; note = 2'-O-methyl-adenosine-3'-phosphate
  modified_base 12: mod_base = OTHER; note = 2'-O-methyl-uridine-3'-phosphate
  modified_base 13: mod_base = OTHER; note = 2'-O-methyl-uridine-3'-phosphate
  modified_base 14: mod_base = OTHER; note = 2'-O-methyl-uridine-3'-phosphate
  modified_base 15: mod_base = OTHER; note = 2'-O-methyl-uridine-3'-phosphate
  modified_base 16: mod_base = OTHER; note = 2'-O-methyl-cytidine-3'-phosphate
  modified_base 17: mod_base = OTHER; note = 2'-O-methyl-adenosine-3'-phosphate
  modified_base 18: mod_base = OTHER; note = 2'-O-methyl-uridine-3'-phosphate
  modified_base 19: mod_base = OTHER; note = 2'-O-methyl-adenosine-3'-phosphate
agtcaaagctattttcata

SEQ ID NO: 788 - RNA, 21 nt, synthetic construct
  source 1..21: mol_type = other RNA
tatgaaaatagctttgacttt

SEQ ID NO: 789 - RNA, 19 nt, synthetic construct
  source 1..19: mol_type = other RNA
  modified_base 1: mod_base = OTHER; note = 2'-O-methyl-adenosine-3'-phosphate
  modified_base 2: mod_base = OTHER; note = 2'-O-methyl-guanosine-3'-phosphate
  modified_base 3: mod_base = OTHER; note = 2'-O-methyl-uridine-3'-phosphate
  modified_base 4: mod_base = OTHER; note = 2'-O-methyl-cytidine-3'-phosphate
  modified_base 5: mod_base = OTHER; note = 2'-fluoro-adenosine-3'-phosphate
  modified_base 6: mod_base = OTHER; note = 2'-fluoro-adenosine-3'-phosphate
  modified_base 7: mod_base = OTHER; note = 2'-fluoro-adenosine-3'-phosphate
  modified_base 8: mod_base = OTHER; note = 2'-O-methyl-guanosine-3'-phosphate
  modified_base 9: mod_base = OTHER; note = 2'-O-methyl-cytidine-3'-phosphate
  modified_base 10: mod_base = OTHER; note = 2'-O-methyl-uridine-3'-phosphate
  modified_base 11: mod_base = OTHER; note = 2'-O-methyl-adenosine-3'-phosphate
  modified_base 12: mod_base = OTHER; note = 2'-O-methyl-uridine-3'-phosphate
  modified_base 13: mod_base = OTHER; note = 2'-O-methyl-uridine-3'-phosphate
  modified_base 14: mod_base = OTHER; note = 2'-O-methyl-uridine-3'-phosphate
  modified_base 15: mod_base = OTHER; note = 2'-O-methyl-uridine-3'-phosphate
  modified_base 16: mod_base = OTHER; note = 2'-O-methyl-cytidine-3'-phosphate
  modified_base 17: mod_base = OTHER; note = 2'-O-methyl-adenosine-3'-phosphate
  modified_base 18: mod_base = OTHER; note = 2'-O-methyl-uridine-3'-phosphate
  modified_base 19: mod_base = OTHER; note = 2'-O-methyl-adenosine-3'-phosphate
agtcaaagctattttcata

SEQ ID NO: 790 - RNA, 21 nt, synthetic construct
  source 1..21: mol_type = other RNA
tatgaaaatagctttgacttt

SEQ ID NO: 791 - RNA, 19 nt, synthetic construct
  source 1..19: mol_type = other RNA
  modified_base 1: mod_base = OTHER; note = 2'-O-methyl-adenosine-3'-phosphate
  modified_base 2: mod_base = OTHER; note = 2'-O-methyl-guanosine-3'-phosphate
  modified_base 3: mod_base = OTHER; note = 2'-O-methyl-uridine-3'-phosphate
  modified_base 4: mod_base = OTHER; note = 2'-O-methyl-cytidine-3'-phosphate
  modified_base 5: mod_base = OTHER; note = 2'-fluoro-adenosine-3'-phosphate
  modified_base 6: mod_base = OTHER; note = 2'-fluoro-adenosine-3'-phosphate
  modified_base 7: mod_base = OTHER; note = 2'-fluoro-adenosine-3'-phosphate
  modified_base 8: mod_base = OTHER; note = 2'-fluoro-guanosine-3'-phosphate
  modified_base 9: mod_base = OTHER; note = 2'-O-methyl-cytidine-3'-phosphate
  modified_base 10: mod_base = OTHER; note = 2'-O-methyl-uridine-3'-phosphate
  modified_base 11: mod_base = OTHER; note = 2'-O-methyl-adenosine-3'-phosphate
  modified_base 12: mod_base = OTHER; note = 2'-O-methyl-uridine-3'-phosphate
  modified_base 13: mod_base = OTHER; note = 2'-O-methyl-uridine-3'-phosphate
  modified_base 14: mod_base = OTHER; note = 2'-O-methyl-uridine-3'-phosphate
  modified_base 15: mod_base = OTHER; note = 2'-O-methyl-uridine-3'-phosphate
  modified_base 16: mod_base = OTHER; note = 2'-O-methyl-cytidine-3'-phosphate
  modified_base 17: mod_base = OTHER; note = 2'-O-methyl-adenosine-3'-phosphate
  modified_base 18: mod_base = OTHER; note = 2'-O-methyl-uridine-3'-phosphate
  modified_base 19: mod_base = OTHER; note = 2'-O-methyl-adenosine-3'-phosphate
agtcaaagctattttcata

SEQ ID NO: 792 - RNA, 21 nt, synthetic construct
  source 1..21: mol_type = other RNA
tatgaaaatagctttgacttt

SEQ ID NO: 793 - RNA, 19 nt, synthetic construct
  source 1..19: mol_type = other RNA
  modified_base 1: mod_base = OTHER; note = 2'-O-methyl-adenosine-3'-phosphate
  modified_base 2: mod_base = OTHER; note = 2'-O-methyl-guanosine-3'-phosphate
  modified_base 3: mod_base = OTHER; note = 2'-O-methyl-uridine-3'-phosphate
  modified_base 4: mod_base = OTHER; note = 2'-O-methyl-cytidine-3'-phosphate
  modified_base 5: mod_base = OTHER; note = 2'-fluoro-adenosine-3'-phosphate
  modified_base 6: mod_base = OTHER; note = 2'-fluoro-adenosine-3'-phosphate
  modified_base 7: mod_base = OTHER; note = 2'-fluoro-adenosine-3'-phosphate
  modified_base 8: mod_base = OTHER; note = 2'-fluoro-guanosine-3'-phosphate
  modified_base 9: mod_base = OTHER; note = 2'-fluoro-cytidine-3'-phosphate
  modified_base 10: mod_base = OTHER; note = 2'-O-methyl-uridine-3'-phosphate
  modified_base 11: mod_base = OTHER; note = 2'-O-methyl-adenosine-3'-phosphate
  modified_base 12: mod_base = OTHER; note = 2'-O-methyl-uridine-3'-phosphate
  modified_base 13: mod_base = OTHER; note = 2'-O-methyl-uridine-3'-phosphate
  modified_base 14: mod_base = OTHER; note = 2'-O-methyl-uridine-3'-phosphate
  modified_base 15: mod_base = OTHER; note = 2'-O-methyl-uridine-3'-phosphate
  modified_base 16: mod_base = OTHER; note = 2'-O-methyl-cytidine-3'-phosphate
  modified_base 17: mod_base = OTHER; note = 2'-O-methyl-adenosine-3'-phosphate
  modified_base 18: mod_base = OTHER; note = 2'-O-methyl-uridine-3'-phosphate
  modified_base 19: mod_base = OTHER; note = 2'-O-methyl-adenosine-3'-phosphate
agtcaaagctattttcata

SEQ ID NO: 794 - RNA, 21 nt, synthetic construct
  source 1..21: mol_type = other RNA
tatgaaaatagctttgacttt

SEQ ID NO: 795 - RNA, 19 nt, synthetic construct
  source 1..19: mol_type = other RNA
  modified_base 1: mod_base = OTHER; note = 2'-O-methyl-adenosine-3'-thiophosphate-phosphate
  modified_base 2: mod_base = OTHER; note = 2'-O-methyl-guanosine-3'-phosphate
  modified_base 3: mod_base = OTHER; note = 2'-O-methyl-uridine-3'-phosphate
  modified_base 4: mod_base = OTHER; note = 2'-O-methyl-cytidine-3'-phosphate
  modified_base 5: mod_base = OTHER; note = 2'-fluoro-adenosine-3'-phosphate
  modified_base 6: mod_base = OTHER; note = 2'-fluoro-adenosine-3'-phosphate
  modified_base 7: mod_base = OTHER; note = 2'-fluoro-adenosine-3'-phosphate
  modified_base 8: mod_base = OTHER; note = 2'-fluoro-guanosine-3'-phosphate
  modified_base 9: mod_base = OTHER; note = 2'-fluoro-cytidine-3'-phosphate
  modified_base 10: mod_base = OTHER; note = 2'-fluoro-uridine-3'-phosphate
  modified_base 11: mod_base = OTHER; note = 2'-O-methyl-adenosine-3'-phosphate
  modified_base 12: mod_base = OTHER; note = 2'-O-methyl-uridine-3'-phosphate
  modified_base 13: mod_base = OTHER; note = 2'-O-methyl-uridine-3'-phosphate
  modified_base 14: mod_base = OTHER; note = 2'-O-methyl-uridine-3'-phosphate
  modified_base 15: mod_base = OTHER; note = 2'-O-methyl-uridine-3'-phosphate
  modified_base 16: mod_base = OTHER; note = 2'-O-methyl-cytidine-3'-phosphate
  modified_base 17: mod_base = OTHER; note = 2'-O-methyl-adenosine-3'-phosphate
  modified_base 18: mod_base = OTHER; note = 2'-O-methyl-uridine-3'-phosphate
  modified_base 19: mod_base = OTHER; note = 2'-O-methyl-adenosine-3'-phosphate
agtcaaagctattttcata

SEQ ID NO: 796 - RNA, 21 nt, synthetic construct
  source 1..21: mol_type = other RNA
tatgaaaatagctttgacttt

SEQ ID NO: 797 - RNA, 19 nt, synthetic construct
  source 1..19: mol_type = other RNA
  modified_base 1: mod_base = OTHER; note = 2'-O-methyl-adenosine-3'-thiophosphate-phosphate
  modified_base 2: mod_base = OTHER; note = 2'-O-methyl-guanosine-3'-thiophosphate-phosphate
  modified_base 3: mod_base = OTHER; note = 2'-O-methyl-uridine-3'-phosphate
  modified_base 4: mod_base = OTHER; note = 2'-O-methyl-cytidine-3'-phosphate
  modified_base 5: mod_base = OTHER; note = 2'-fluoro-adenosine-3'-phosphate
  modified_base 6: mod_base = OTHER; note = 2'-fluoro-adenosine-3'-phosphate
  modified_base 7: mod_base = OTHER; note = 2'-fluoro-adenosine-3'-phosphate
  modified_base 8: mod_base = OTHER; note = 2'-fluoro-guanosine-3'-phosphate
  modified_base 9: mod_base = OTHER; note = 2'-fluoro-cytidine-3'-phosphate
  modified_base 10: mod_base = OTHER; note = 2'-fluoro-uridine-3'-phosphate
  modified_base 11: mod_base = OTHER; note = 2'-O-methyl-adenosine-3'-phosphate
  modified_base 12: mod_base = OTHER; note = 2'-O-methyl-uridine-3'-phosphate
  modified_base 13: mod_base = OTHER; note = 2'-O-methyl-uridine-3'-phosphate
  modified_base 14: mod_base = OTHER; note = 2'-O-methyl-uridine-3'-phosphate
  modified_base 15: mod_base = OTHER; note = 2'-O-methyl-uridine-3'-phosphate
  modified_base 16: mod_base = OTHER; note = 2'-O-methyl-cytidine-3'-phosphate
  modified_base 17: mod_base = OTHER; note = 2'-O-methyl-adenosine-3'-phosphate
  modified_base 18: mod_base = OTHER; note = 2'-O-methyl-uridine-3'-phosphate
  modified_base 19: mod_base = OTHER; note = 2'-O-methyl-adenosine-3'-phosphate
agtcaaagctattttcata

SEQ ID NO: 798 - RNA, 21 nt, synthetic construct
  source 1..21: mol_type = other RNA
tatgaaaatagctttgacttt

SEQ ID NO: 799 - RNA, 19 nt, synthetic construct
  source 1..19: mol_type = other RNA
  modified_base 1: mod_base = OTHER; note = 2'-O-methyl-adenosine-3'-thiophosphate-phosphate
  modified_base 2: mod_base = OTHER; note = 2'-O-methyl-guanosine-3'-thiophosphate-phosphate
  modified_base 3: mod_base = OTHER; note = 2'-O-methyl-uridine-3'-phosphate
  modified_base 4: mod_base = OTHER; note = 2'-O-methyl-cytidine-3'-phosphate
  modified_base 5: mod_base = OTHER; note = 2'-fluoro-adenosine-3'-phosphate
  modified_base 6: mod_base = OTHER; note = 2'-fluoro-adenosine-3'-phosphate
  modified_base 7: mod_base = OTHER; note = 2'-fluoro-adenosine-3'-phosphate
  modified_base 8: mod_base = OTHER; note = 2'-fluoro-guanosine-3'-phosphate
  modified_base 9: mod_base = OTHER; note = 2'-fluoro-cytidine-3'-phosphate
  modified_base 10: mod_base = OTHER; note = 2'-fluoro-uridine-3'-phosphate
  modified_base 11: mod_base = OTHER; note = 2'-O-methyl-adenosine-3'-phosphate
  modified_base 12: mod_base = OTHER; note = 2'-O-methyl-uridine-3'-phosphate
  modified_base 13: mod_base = OTHER; note = 2'-O-methyl-uridine-3'-phosphate
  modified_base 14: mod_base = OTHER; note = 2'-O-methyl-uridine-3'-phosphate
  modified_base 15: mod_base = OTHER; note = 2'-O-methyl-uridine-3'-phosphate
  modified_base 16: mod_base = OTHER; note = 2'-O-methyl-cytidine-3'-phosphate
  modified_base 17: mod_base = OTHER; note = 2'-O-methyl-adenosine-3'-phosphate
  modified_base 18: mod_base = OTHER; note = 2'-O-methyl-uridine-3'-phosphate
  modified_base 19: mod_base = OTHER; note = 2'-O-methyl-adenosine-3'-phosphate
agtcaaagctattttcata

SEQ ID NO: 800 - RNA, 21 nt, synthetic construct
  source 1..21: mol_type = other RNA
  modified_base 1: mod_base = OTHER; note = 2'-O-methyl-uridine-3'-thiophosphate-phosphate
  modified_base 2: mod_base = OTHER; note = 2'-fluoro-adenosine-3'-thiophosphate-phosphate
  modified_base 3: mod_base = OTHER; note = 2'-O-methyl-uridine-3'-phosphate
  modified_base 4: mod_base = OTHER; note = 2'-fluoro-guanosine-3'-phosphate
  modified_base 5: mod_base = OTHER; note = 2'-O-methyl-adenosine-3'-phosphate
  modified_base 6: mod_base = OTHER; note = 2'-fluoro-adenosine-3'-phosphate
  modified_base 7: mod_base = OTHER; note = 2'-O-methyl-adenosine-3'-phosphate
  modified_base 8: mod_base = OTHER; note = 2'-fluoro-adenosine-3'-phosphate
  modified_base 9: mod_base = OTHER; note = 2'-O-methyl-uridine-3'-phosphate
  modified_base 10: mod_base = OTHER; note = 2'-O-methyl-adenosine-3'-phosphate
  modified_base 11: mod_base = OTHER; note = 2'-O-methyl-guanosine-3'-phosphate
  modified_base 12: mod_base = OTHER; note = 2'-fluoro-cytidine-3'-phosphate
  modified_base 13: mod_base = OTHER; note = 2'-O-methyl-uridine-3'-phosphate
  modified_base 14: mod_base = OTHER; note = 2'-fluoro-uridine-3'-phosphate
  modified_base 15: mod_base = OTHER; note = 2'-O-methyl-uridine-3'-phosphate
  modified_base 16: mod_base = OTHER; note = 2'-fluoro-guanosine-3'-phosphate
  modified_base 17: mod_base = OTHER; note = 2'-O-methyl-adenosine-3'-phosphate
  modified_base 18: mod_base = OTHER; note = 2'-fluoro-cytidine-3'-phosphate
  modified_base 19: mod_base = OTHER; note = 2'-O-methyl-guanosine-3'-thiophosphate-phosphate
  modified_base 20: mod_base = OTHER; note = 2'-O-methyl-uridine-3'-thiophosphate-phosphate
  modified_base 21: mod_base = OTHER; note = 2'-O-methyl-uridine-3'-phosphate
tatgaaaatagctttgacgtt

SEQ ID NO: 801 - RNA, 19 nt, synthetic construct
  source 1..19: mol_type = other RNA
catgtgattacatcatctt

SEQ ID NO: 802 - RNA, 21 nt, synthetic construct
  source 1..21: mol_type = other RNA
  modified_base 1: mod_base = OTHER; note = 2'-O-methyl-adenosine-3'-phosphate
  modified_base 2: mod_base = OTHER; note = 2'-fluoro-adenosine-3'-phosphate
  modified_base 3: mod_base = OTHER; note = 2'-O-methyl-guanosine-3'-phosphate
  modified_base 4: mod_base = OTHER; note = 2'-fluoro-adenosine-3'-phosphate
  modified_base 5: mod_base = OTHER; note = 2'-O-methyl-uridine-3'-phosphate
  modified_base 6: mod_base = OTHER; note = 2'-fluoro-guanosine-3'-phosphate
  modified_base 7: mod_base = OTHER; note = 2'-O-methyl-adenosine-3'-phosphate
  modified_base 8: mod_base = OTHER; note = 2'-fluoro-uridine-3'-phosphate
  modified_base 9: mod_base = OTHER; note = 2'-O-methyl-guanosine-3'-phosphate
  modified_base 10: mod_base = OTHER; note = 2'-O-methyl-uridine-3'-phosphate
  modified_base 11: mod_base = OTHER; note = 2'-O-methyl-adenosine-3'-phosphate
  modified_base 12: mod_base = OTHER; note = 2'-fluoro-adenosine-3'-phosphate
  modified_base 13: mod_base = OTHER; note = 2'-O-methyl-uridine-3'-phosphate
  modified_base 14: mod_base = OTHER; note = 2'-fluoro-cytidine-3'-phosphate
  modified_base 15: mod_base = OTHER; note = 2'-O-methyl-adenosine-3'-phosphate
  modified_base 16: mod_base = OTHER; note = 2'-fluoro-cytidine-3'-phosphate
  modified_base 17: mod_base = OTHER; note = 2'-O-methyl-adenosine-3'-phosphate
  modified_base 18: mod_base = OTHER; note = 2'-fluoro-uridine-3'-phosphate
  modified_base 19: mod_base = OTHER; note = 2'-O-methyl-guanosine-3'-phosphate
  modified_base 20: mod_base = OTHER; note = 2'-O-methyl-uridine-3'-phosphate
  modified_base 21: mod_base = OTHER; note = 2'-O-methyl-cytidine-3'-phosphate
aagatgatgtaatcacatgtc

SEQ ID NO: 803 - RNA, 19 nt, synthetic construct
  source 1..19: mol_type = other RNA
catgtgattacatcatctt

SEQ ID NO: 804 - RNA, 21 nt, synthetic construct
  source 1..21: mol_type = other RNA
  modified_base 1: mod_base = OTHER; note = 2'-O-methyl-adenosine-3'-phosphate
  modified_base 2: mod_base = OTHER; note = 2'-fluoro-adenosine-3'-phosphate
  modified_base 3: mod_base = OTHER; note = 2'-O-methyl-guanosine-3'-phosphate
  modified_base 4: mod_base = OTHER; note = 2'-fluoro-adenosine-3'-phosphate
  modified_base 5: mod_base = OTHER; note = 2'-O-methyl-uridine-3'-phosphate
  modified_base 6: mod_base = OTHER; note = 2'-fluoro-guanosine-3'-phosphate
  modified_base 7: mod_base = OTHER; note = 2'-O-methyl-adenosine-3'-phosphate
  modified_base 8: mod_base = OTHER; note = 2'-fluoro-uridine-3'-phosphate
  modified_base 9: mod_base = OTHER; note = 2'-fluoro-guanosine-3'-phosphate
  modified_base 10: mod_base = OTHER; note = 2'-O-methyl-uridine-3'-phosphate
  modified_base 11: mod_base = OTHER; note = 2'-O-methyl-adenosine-3'-phosphate
  modified_base 12: mod_base = OTHER; note = 2'-fluoro-adenosine-3'-phosphate
  modified_base 13: mod_base = OTHER; note = 2'-O-methyl-uridine-3'-phosphate
  modified_base 14: mod_base = OTHER; note = 2'-fluoro-cytidine-3'-phosphate
  modified_base 15: mod_base = OTHER; note = 2'-O-methyl-adenosine-3'-phosphate
  modified_base 16: mod_base = OTHER; note = 2'-fluoro-cytidine-3'-phosphate
  modified_base 17: mod_base = OTHER; note = 2'-O-methyl-adenosine-3'-phosphate
  modified_base 18: mod_base = OTHER; note = 2'-fluoro-uridine-3'-phosphate
  modified_base 19: mod_base = OTHER; note = 2'-O-methyl-guanosine-3'-phosphate
  modified_base 20: mod_base = OTHER; note = 2'-O-methyl-uridine-3'-phosphate
  modified_base 21: mod_base = OTHER; note = 2'-O-methyl-cytidine-3'-phosphate
aagatgatgtaatcacatgtc

SEQ ID NO: 805 - RNA, 19 nt, synthetic construct
  source 1..19: mol_type = other RNA
catgtgattacatcatctt

SEQ ID NO: 806 - RNA, 21 nt, synthetic construct
  source 1..21: mol_type = other RNA
  modified_base 1: mod_base = OTHER; note = 2'-O-methyl-adenosine-3'-phosphate
  modified_base 2: mod_base = OTHER; note = 2'-fluoro-adenosine-3'-phosphate
  modified_base 3: mod_base = OTHER; note = 2'-O-methyl-guanosine-3'-phosphate
  modified_base 4: mod_base = OTHER; note = 2'-fluoro-adenosine-3'-phosphate
  modified_base 5: mod_base = OTHER; note = 2'-O-methyl-uridine-3'-phosphate
  modified_base 6: mod_base = OTHER; note = 2'-fluoro-guanosine-3'-phosphate
  modified_base 7: mod_base = OTHER; note = 2'-O-methyl-adenosine-3'-phosphate
  modified_base 8: mod_base = OTHER; note = 2'-fluoro-uridine-3'-phosphate
  modified_base 9: mod_base = OTHER; note = 2'-O-methyl-guanosine-3'-phosphate
  modified_base 10: mod_base = OTHER; note = 2'-fluoro-uridine-3'-phosphate
  modified_base 11: mod_base = OTHER; note = 2'-O-methyl-adenosine-3'-phosphate
  modified_base 12: mod_base = OTHER; note = 2'-fluoro-adenosine-3'-phosphate
  modified_base 13: mod_base = OTHER; note = 2'-O-methyl-uridine-3'-phosphate
  modified_base 14: mod_base = OTHER; note = 2'-fluoro-cytidine-3'-phosphate
  modified_base 15: mod_base = OTHER; note = 2'-O-methyl-adenosine-3'-phosphate
  modified_base 16: mod_base = OTHER; note = 2'-fluoro-cytidine-3'-phosphate
  modified_base 17: mod_base = OTHER; note = 2'-O-methyl-adenosine-3'-phosphate
  modified_base 18: mod_base = OTHER; note = 2'-fluoro-uridine-3'-phosphate
  modified_base 19: mod_base = OTHER; note = 2'-O-methyl-guanosine-3'-phosphate
  modified_base 20: mod_base = OTHER; note = 2'-O-methyl-uridine-3'-phosphate
  modified_base 21: mod_base = OTHER; note = 2'-O-methyl-cytidine-3'-phosphate
aagatgatgtaatcacatgtc

SEQ ID NO: 807 - RNA, 19 nt, synthetic construct
  source 1..19: mol_type = other RNA
catgtgattacatcatctt

SEQ ID NO: 808 - RNA, 21 nt, synthetic construct
  source 1..21: mol_type = other RNA
  modified_base 1: mod_base = OTHER; note = 2'-O-methyl-adenosine-3'-phosphate
  modified_base 2: mod_base = OTHER; note = 2'-fluoro-adenosine-3'-phosphate
  modified_base 3: mod_base = OTHER; note = 2'-O-methyl-guanosine-3'-phosphate
  modified_base 4: mod_base = OTHER; note = 2'-fluoro-adenosine-3'-phosphate
  modified_base 5: mod_base = OTHER; note = 2'-O-methyl-uridine-3'-phosphate
  modified_base 6: mod_base = OTHER; note = 2'-fluoro-guanosine-3'-phosphate
  modified_base 7: mod_base = OTHER; note = 2'-O-methyl-adenosine-3'-phosphate
  modified_base 8: mod_base = OTHER; note = 2'-fluoro-uridine-3'-phosphate
  modified_base 9: mod_base = OTHER; note = 2'-O-methyl-guanosine-3'-phosphate
  modified_base 10: mod_base = OTHER; note = 2'-O-methyl-uridine-3'-phosphate
  modified_base 11: mod_base = OTHER; note = 2'-fluoro-adenosine-3'-phosphate
  modified_base 12: mod_base = OTHER; note = 2'-fluoro-adenosine-3'-phosphate
  modified_base 13: mod_base = OTHER; note = 2'-O-methyl-uridine-3'-phosphate
  modified_base 14: mod_base = OTHER; note = 2'-fluoro-cytidine-3'-phosphate
  modified_base 15: mod_base = OTHER; note = 2'-O-methyl-adenosine-3'-phosphate
  modified_base 16: mod_base = OTHER; note = 2'-fluoro-cytidine-3'-phosphate
  modified_base 17: mod_base = OTHER; note = 2'-O-methyl-adenosine-3'-phosphate
  modified_base 18: mod_base = OTHER; note = 2'-fluoro-uridine-3'-phosphate
  modified_base 19: mod_base = OTHER; note = 2'-O-methyl-guanosine-3'-phosphate
  modified_base 20: mod_base = OTHER; note = 2'-O-methyl-uridine-3'-phosphate
  modified_base 21: mod_base = OTHER; note = 2'-O-methyl-cytidine-3'-phosphate
aagatgatgtaatcacatgtc

SEQ ID NO: 809 - RNA, 19 nt, synthetic construct
  source 1..19: mol_type = other RNA
catgtgattacatcatctt

SEQ ID NO: 810 - RNA, 21 nt, synthetic construct
  source 1..21: mol_type = other RNA
  modified_base 1: mod_base = OTHER; note = 2'-O-methyl-adenosine-3'-phosphate
  modified_base 2: mod_base = OTHER; note = 2'-O-methyl-adenosine-3'-phosphate
  modified_base 3: mod_base = OTHER; note = 2'-O-methyl-guanosine-3'-phosphate
  modified_base 4: mod_base = OTHER; note = 2'-fluoro-adenosine-3'-phosphate
  modified_base 5: mod_base = OTHER; note = 2'-O-methyl-uridine-3'-phosphate
  modified_base 6: mod_base = OTHER; note = 2'-fluoro-guanosine-3'-phosphate
  modified_base 7: mod_base = OTHER; note = 2'-O-methyl-adenosine-3'-phosphate
  modified_base 8: mod_base = OTHER; note = 2'-fluoro-uridine-3'-phosphate
  modified_base 9: mod_base = OTHER; note = 2'-O-methyl-guanosine-3'-phosphate
  modified_base 10: mod_base = OTHER; note = 2'-O-methyl-uridine-3'-phosphate
  modified_base 11: mod_base = OTHER; note = 2'-O-methyl-adenosine-3'-phosphate
  modified_base 12: mod_base = OTHER; note = 2'-fluoro-adenosine-3'-phosphate
  modified_base 13: mod_base = OTHER; note = 2'-O-methyl-uridine-3'-phosphate
  modified_base 14: mod_base = OTHER; note = 2'-fluoro-cytidine-3'-phosphate
  modified_base 15: mod_base = OTHER; note = 2'-O-methyl-adenosine-3'-phosphate
  modified_base 16: mod_base = OTHER; note = 2'-fluoro-cytidine-3'-phosphate
  modified_base 17: mod_base = OTHER; note = 2'-O-methyl-adenosine-3'-phosphate
  modified_base 18: mod_base = OTHER; note = 2'-fluoro-uridine-3'-phosphate
  modified_base 19: mod_base = OTHER; note = 2'-O-methyl-guanosine-3'-phosphate
  modified_base 20: mod_base = OTHER; note = 2'-O-methyl-uridine-3'-phosphate
  modified_base 21: mod_base = OTHER; note = 2'-O-methyl-cytidine-3'-phosphate
aagatgatgtaatcacatgtc

SEQ ID NO: 811 - RNA, 19 nt, synthetic construct
  source 1..19: mol_type = other RNA
catgtgattacatcatctt

SEQ ID NO: 812 - RNA, 21 nt, synthetic construct
  source 1..21: mol_type = other RNA
  modified_base 1: mod_base = OTHER; note = 2'-O-methyl-adenosine-3'-phosphate
  modified_base 2: mod_base = OTHER; note = 2'-fluoro-adenosine-3'-phosphate
  modified_base 3: mod_base = OTHER; note = 2'-O-methyl-guanosine-3'-phosphate
  modified_base 4: mod_base = OTHER; note = 2'-O-methyl-adenosine-3'-phosphate
  modified_base 5: mod_base = OTHER; note = 2'-O-methyl-uridine-3'-phosphate
  modified_base 6: mod_base = OTHER; note = 2'-fluoro-guanosine-3'-phosphate
  modified_base 7: mod_base = OTHER; note = 2'-O-methyl-adenosine-3'-phosphate
  modified_base 8: mod_base = OTHER; note = 2'-fluoro-uridine-3'-phosphate
  modified_base 9: mod_base = OTHER; note = 2'-O-methyl-guanosine-3'-phosphate
  modified_base 10: mod_base = OTHER; note = 2'-O-methyl-uridine-3'-phosphate
  modified_base 11: mod_base = OTHER; note = 2'-O-methyl-adenosine-3'-phosphate
  modified_base 12: mod_base = OTHER; note = 2'-fluoro-adenosine-3'-phosphate
  modified_base 13: mod_base = OTHER; note = 2'-O-methyl-uridine-3'-phosphate
  modified_base 14: mod_base = OTHER; note = 2'-fluoro-cytidine-3'-phosphate
  modified_base 15: mod_base = OTHER; note = 2'-O-methyl-adenosine-3'-phosphate
  modified_base 16: mod_base = OTHER; note = 2'-fluoro-cytidine-3'-phosphate
  modified_base 17: mod_base = OTHER; note = 2'-O-methyl-adenosine-3'-phosphate
  modified_base 18: mod_base = OTHER; note = 2'-fluoro-uridine-3'-phosphate
  modified_base 19: mod_base = OTHER; note = 2'-O-methyl-guanosine-3'-phosphate
  modified_base 20: mod_base = OTHER; note = 2'-O-methyl-uridine-3'-phosphate
  modified_base 21: mod_base = OTHER; note = 2'-O-methyl-cytidine-3'-phosphate
aagatgatgtaatcacatgtc

SEQ ID NO: 813 - RNA, 19 nt, synthetic construct
  source 1..19: mol_type = other RNA
catgtgattacatcatctt

SEQ ID NO: 814 - RNA, 21 nt, synthetic construct
  source 1..21: mol_type = other RNA
  modified_base 1: mod_base = OTHER; note = 2'-O-methyl-adenosine-3'-phosphate
  modified_base 2: mod_base = OTHER; note = 2'-fluoro-adenosine-3'-phosphate
  modified_base 3: mod_base = OTHER; note = 2'-O-methyl-guanosine-3'-phosphate
  modified_base 4: mod_base = OTHER; note = 2'-fluoro-adenosine-3'-phosphate
  modified_base 5: mod_base = OTHER; note = 2'-O-methyl-uridine-3'-phosphate
  modified_base 6: mod_base = OTHER; note = 2'-O-methyl-guanosine-3'-phosphate
  modified_base 7: mod_base = OTHER; note = 2'-O-methyl-adenosine-3'-phosphate
  modified_base 8: mod_base = OTHER; note = 2'-fluoro-uridine-3'-phosphate
  modified_base 9: mod_base = OTHER; note = 2'-O-methyl-guanosine-3'-phosphate
  modified_base 10: mod_base = OTHER; note = 2'-O-methyl-uridine-3'-phosphate
  modified_base 11: mod_base = OTHER; note = 2'-O-methyl-adenosine-3'-phosphate
  modified_base 12: mod_base = OTHER; note = 2'-fluoro-adenosine-3'-phosphate
  modified_base 13: mod_base = OTHER; note = 2'-O-methyl-uridine-3'-phosphate
  modified_base 14: mod_base = OTHER; note = 2'-fluoro-cytidine-3'-phosphate
  modified_base 15: mod_base = OTHER; note = 2'-O-methyl-adenosine-3'-phosphate
  modified_base 16: mod_base = OTHER; note = 2'-fluoro-cytidine-3'-phosphate
  modified_base 17: mod_base = OTHER; note = 2'-O-methyl-adenosine-3'-phosphate
  modified_base 18: mod_base = OTHER; note = 2'-fluoro-uridine-3'-phosphate
  modified_base 19: mod_base = OTHER; note = 2'-O-methyl-guanosine-3'-phosphate
  modified_base 20: mod_base = OTHER; note = 2'-O-methyl-uridine-3'-phosphate
  modified_base 21: mod_base = OTHER; note = 2'-O-methyl-cytidine-3'-phosphate
aagatgatgtaatcacatgtc

SEQ ID NO: 815 - RNA, 19 nt, synthetic construct
  source 1..19: mol_type = other RNA
catgtgattacatcatctt

SEQ ID NO: 816 - RNA, 21 nt, synthetic construct
  source 1..21: mol_type = other RNA
  modified_base 1: mod_base = OTHER; note = 2'-O-methyl-adenosine-3'-phosphate
  modified_base 2: mod_base = OTHER; note = 2'-fluoro-adenosine-3'-phosphate
  modified_base 3: mod_base = OTHER; note = 2'-O-methyl-guanosine-3'-phosphate
  modified_base 4: mod_base = OTHER; note = 2'-fluoro-adenosine-3'-phosphate
  modified_base 5: mod_base = OTHER; note = 2'-O-methyl-uridine-3'-phosphate
  modified_base 6: mod_base = OTHER; note = 2'-fluoro-guanosine-3'-phosphate
  modified_base 7: mod_base = OTHER; note = 2'-O-methyl-adenosine-3'-phosphate
  modified_base 8: mod_base = OTHER; note = 2'-O-methyl-uridine-3'-phosphate
  modified_base 9: mod_base = OTHER; note = 2'-O-methyl-guanosine-3'-phosphate
  modified_base 10: mod_base = OTHER; note = 2'-O-methyl-uridine-3'-phosphate
  modified_base 11: mod_base = OTHER; note = 2'-O-methyl-adenosine-3'-phosphate
  modified_base 12: mod_base = OTHER; note = 2'-fluoro-adenosine-3'-phosphate
  modified_base 13: mod_base = OTHER; note = 2'-O-methyl-uridine-3'-phosphate
  modified_base 14: mod_base = OTHER; note = 2'-fluoro-cytidine-3'-phosphate
  modified_base 15: mod_base = OTHER; note = 2'-O-methyl-adenosine-3'-phosphate
  modified_base 16: mod_base = OTHER; note = 2'-fluoro-cytidine-3'-phosphate
  modified_base 17: mod_base = OTHER; note = 2'-O-methyl-adenosine-3'-phosphate
  modified_base 18: mod_base = OTHER; note = 2'-fluoro-uridine-3'-phosphate
  modified_base 19: mod_base = OTHER; note = 2'-O-methyl-guanosine-3'-phosphate
  modified_base 20: mod_base = OTHER; note = 2'-O-methyl-uridine-3'-phosphate
  modified_base 21: mod_base = OTHER; note = 2'-O-methyl-cytidine-3'-phosphate
aagatgatgtaatcacatgtc

SEQ ID NO: 817 - RNA, 19 nt, synthetic construct
  source 1..19: mol_type = other RNA
catgtgattacatcatctt

SEQ ID NO: 818 - RNA, 21 nt, synthetic construct
  source 1..21: mol_type = other RNA
  modified_base 1: mod_base = OTHER; note = 2'-O-methyl-adenosine-3'-phosphate
  modified_base 2: mod_base = OTHER; note = 2'-fluoro-adenosine-3'-phosphate
  modified_base 3: mod_base = OTHER; note = 2'-O-methyl-guanosine-3'-phosphate
  modified_base 4: mod_base = OTHER; note = 2'-fluoro-adenosine-3'-phosphate
  modified_base 5: mod_base = OTHER; note = 2'-O-methyl-uridine-3'-phosphate
  modified_base 6: mod_base = OTHER; note = 2'-fluoro-guanosine-3'-phosphate
  modified_base 7: mod_base = OTHER; note = 2'-O-methyl-adenosine-3'-phosphate
  modified_base 8: mod_base = OTHER; note = 2'-fluoro-uridine-3'-phosphate
  modified_base 9: mod_base = OTHER; note = 2'-O-methyl-guanosine-3'-phosphate
  modified_base 10: mod_base = OTHER; note = 2'-O-methyl-uridine-3'-phosphate
  modified_base 11: mod_base = OTHER; note = 2'-O-methyl-adenosine-3'-phosphate
  modified_base 12: mod_base = OTHER; note = 2'-O-methyl-adenosine-3'-phosphate
  modified_base 13: mod_base = OTHER; note = 2'-O-methyl-uridine-3'-phosphate
  modified_base 14: mod_base = OTHER; note = 2'-fluoro-cytidine-3'-phosphate
  modified_base 15: mod_base = OTHER; note = 2'-O-methyl-adenosine-3'-phosphate
  modified_base 16: mod_base = OTHER; note = 2'-fluoro-cytidine-3'-phosphate
  modified_base 17: mod_base = OTHER; note = 2'-O-methyl-adenosine-3'-phosphate
  modified_base 18: mod_base = OTHER; note = 2'-fluoro-uridine-3'-phosphate
  modified_base 19: mod_base = OTHER; note = 2'-O-methyl-guanosine-3'-phosphate
  modified_base 20: mod_base = OTHER; note = 2'-O-methyl-uridine-3'-phosphate
  modified_base 21: mod_base = OTHER; note = 2'-O-methyl-cytidine-3'-phosphate
aagatgatgtaatcacatgtc

SEQ ID NO: 819 - RNA, 19 nt, synthetic construct
  source 1..19: mol_type = other RNA
catgtgattacatcatctt

SEQ ID NO: 820 - RNA, 21 nt, synthetic construct
  source 1..21: mol_type = other RNA
  modified_base 1: mod_base = OTHER; note = 2'-O-methyl-adenosine-3'-phosphate
  modified_base 2: mod_base = OTHER; note = 2'-fluoro-adenosine-3'-phosphate
  modified_base 3: mod_base = OTHER; note = 2'-O-methyl-guanosine-3'-phosphate
  modified_base 4: mod_base = OTHER; note = 2'-fluoro-adenosine-3'-phosphate
  modified_base 5: mod_base = OTHER; note = 2'-O-methyl-uridine-3'-phosphate
  modified_base 6: mod_base = OTHER; note = 2'-fluoro-guanosine-3'-phosphate
  modified_base 7: mod_base = OTHER; note = 2'-O-methyl-adenosine-3'-phosphate
  modified_base 8: mod_base = OTHER; note = 2'-fluoro-uridine-3'-phosphate
  modified_base 9: mod_base = OTHER; note = 2'-O-methyl-guanosine-3'-phosphate
  modified_base 10: mod_base = OTHER; note = 2'-O-methyl-uridine-3'-phosphate
  modified_base 11: mod_base = OTHER; note = 2'-O-methyl-adenosine-3'-phosphate
  modified_base 12: mod_base = OTHER; note = 2'-fluoro-adenosine-3'-phosphate
  modified_base 13: mod_base = OTHER; note = 2'-O-methyl-uridine-3'-phosphate
  modified_base 14: mod_base = OTHER; note = 2'-O-methyl-cytidine-3'-phosphate
  modified_base 15: mod_base = OTHER; note = 2'-O-methyl-adenosine-3'-phosphate
  modified_base 16: mod_base = OTHER; note = 2'-fluoro-cytidine-3'-phosphate
  modified_base 17: mod_base = OTHER; note = 2'-O-methyl-adenosine-3'-phosphate
  modified_base 18: mod_base = OTHER; note = 2'-fluoro-uridine-3'-phosphate
  modified_base 19: mod_base = OTHER; note = 2'-O-methyl-guanosine-3'-phosphate
  modified_base 20: mod_base = OTHER; note = 2'-O-methyl-uridine-3'-phosphate
  modified_base 21: mod_base = OTHER; note = 2'-O-methyl-cytidine-3'-phosphate
aagatgatgtaatcacatgtc

SEQ ID NO: 821 - RNA, 19 nt, synthetic construct
  source 1..19: mol_type = other RNA
catgtgattacatcatctt

SEQ ID NO: 822 - RNA, 21 nt, synthetic construct
  source 1..21: mol_type = other RNA
  modified_base 1: mod_base = OTHER; note = 2'-O-methyl-adenosine-3'-phosphate
  modified_base 2: mod_base = OTHER; note = 2'-fluoro-adenosine-3'-phosphate
  modified_base 3: mod_base = OTHER; note = 2'-O-methyl-guanosine-3'-phosphate
  modified_base 4: mod_base = OTHER; note = 2'-fluoro-adenosine-3'-phosphate
  modified_base 5: mod_base = OTHER; note = 2'-O-methyl-uridine-3'-phosphate
  modified_base 6: mod_base = OTHER; note = 2'-fluoro-guanosine-3'-phosphate
  modified_base 7: mod_base = OTHER; note = 2'-O-methyl-adenosine-3'-phosphate
  modified_base 8: mod_base = OTHER; note = 2'-fluoro-uridine-3'-phosphate
  modified_base 9: mod_base = OTHER; note = 2'-O-methyl-guanosine-3'-phosphate
  modified_base 10: mod_base = OTHER; note = 2'-O-methyl-uridine-3'-phosphate
  modified_base 11: mod_base = OTHER; note = 2'-O-methyl-adenosine-3'-phosphate
  modified_base 12: mod_base = OTHER; note = 2'-fluoro-adenosine-3'-phosphate
  modified_base 13: mod_base = OTHER; note = 2'-O-methyl-uridine-3'-phosphate
  modified_base 14: mod_base = OTHER; note = 2'-fluoro-cytidine-3'-phosphate
  modified_base 15: mod_base = OTHER; note = 2'-O-methyl-adenosine-3'-phosphate
  modified_base 16: mod_base = OTHER; note = 2'-O-methyl-cytidine-3'-phosphate
  modified_base 17: mod_base = OTHER; note = 2'-O-methyl-adenosine-3'-phosphate
  modified_base 18: mod_base = OTHER; note = 2'-fluoro-uridine-3'-phosphate
  modified_base 19: mod_base = OTHER; note = 2'-O-methyl-guanosine-3'-phosphate
  modified_base 20: mod_base = OTHER; note = 2'-O-methyl-uridine-3'-phosphate
  modified_base 21: mod_base = OTHER; note = 2'-O-methyl-cytidine-3'-phosphate
aagatgatgtaatcacatgtc

SEQ ID NO: 823 - RNA, 19 nt, synthetic construct
  source 1..19: mol_type = other RNA
catgtgattacatcatctt

SEQ ID NO: 824 - RNA, 21 nt, synthetic construct
  source 1..21: mol_type = other RNA
  modified_base 1: mod_base = OTHER; note = 2'-O-methyl-adenosine-3'-phosphate
  modified_base 2: mod_base = OTHER; note = 2'-fluoro-adenosine-3'-phosphate
  modified_base 3: mod_base = OTHER; note = 2'-O-methyl-guanosine-3'-phosphate
  modified_base 4: mod_base = OTHER; note = 2'-fluoro-adenosine-3'-phosphate
  modified_base 5: mod_base = OTHER; note = 2'-O-methyl-uridine-3'-phosphate
  modified_base 6: mod_base = OTHER; note = 2'-fluoro-guanosine-3'-phosphate
  modified_base 7: mod_base = OTHER; note = 2'-O-methyl-adenosine-3'-phosphate
  modified_base 8: mod_base = OTHER; note = 2'-fluoro-uridine-3'-phosphate
  modified_base 9: mod_base = OTHER; note = 2'-O-methyl-guanosine-3'-phosphate
  modified_base 10: mod_base = OTHER; note = 2'-O-methyl-uridine-3'-phosphate
  modified_base 11: mod_base = OTHER; note = 2'-O-methyl-adenosine-3'-phosphate
  modified_base 12: mod_base = OTHER; note = 2'-fluoro-adenosine-3'-phosphate
  modified_base 13: mod_base = OTHER; note = 2'-O-methyl-uridine-3'-phosphate
  modified_base 14: mod_base = OTHER; note = 2'-fluoro-cytidine-3'-phosphate
  modified_base 15: mod_base = OTHER; note = 2'-O-methyl-adenosine-3'-phosphate
  modified_base 16: mod_base = OTHER; note = 2'-fluoro-cytidine-3'-phosphate
  modified_base 17: mod_base = OTHER; note = 2'-O-methyl-adenosine-3'-phosphate
  modified_base 18: mod_base = OTHER; note = 2'-O-methyl-uridine-3'-phosphate
  modified_base 19: mod_base = OTHER; note = 2'-O-methyl-guanosine-3'-phosphate
  modified_base 20: mod_base = OTHER; note = 2'-O-methyl-uridine-3'-phosphate
  modified_base 21: mod_base = OTHER; note = 2'-O-methyl-cytidine-3'-phosphate
aagatgatgtaatcacatgtc

SEQ ID NO: 825 - RNA, 19 nt, synthetic construct
  source 1..19: mol_type = other RNA
catgtgattacatcatctt

SEQ ID NO: 826 - RNA, 21 nt, synthetic construct
  source 1..21: mol_type = other RNA
  modified_base 1: mod_base = OTHER; note = 2'-O-methyl-adenosine-3'-thiophosphate-phosphate
  modified_base 2: mod_base = OTHER; note = 2'-fluoro-adenosine-3'-phosphate
  modified_base 3: mod_base = OTHER; note = 2'-O-methyl-guanosine-3'-phosphate
  modified_base 4: mod_base = OTHER; note = 2'-fluoro-adenosine-3'-phosphate
  modified_base 5: mod_base = OTHER; note = 2'-O-methyl-uridine-3'-phosphate
  modified_base 6: mod_base = OTHER; note = 2'-fluoro-guanosine-3'-phosphate
  modified_base 7: mod_base = OTHER; note = 2'-O-methyl-adenosine-3'-phosphate
  modified_base 8: mod_base = OTHER; note = 2'-fluoro-uridine-3'-phosphate
  modified_base 9: mod_base = OTHER; note = 2'-O-methyl-guanosine-3'-phosphate
  modified_base 10: mod_base = OTHER; note = 2'-O-methyl-uridine-3'-phosphate
  modified_base 11: mod_base = OTHER; note = 2'-O-methyl-adenosine-3'-phosphate
  modified_base 12: mod_base = OTHER; note = 2'-fluoro-adenosine-3'-phosphate
  modified_base 13: mod_base = OTHER; note = 2'-O-methyl-uridine-3'-phosphate
  modified_base 14: mod_base = OTHER; note = 2'-fluoro-cytidine-3'-phosphate
  modified_base 15: mod_base = OTHER; note = 2'-O-methyl-adenosine-3'-phosphate
  modified_base 16: mod_base = OTHER; note = 2'-fluoro-cytidine-3'-phosphate
  modified_base 17: mod_base = OTHER; note = 2'-O-methyl-adenosine-3'-phosphate
  modified_base 18: mod_base = OTHER; note = 2'-fluoro-uridine-3'-phosphate
  modified_base 19: mod_base = OTHER; note = 2'-O-methyl-guanosine-3'-phosphate
  modified_base 20: mod_base = OTHER; note = 2'-O-methyl-uridine-3'-thiophosphate-phosphate
  modified_base 21: mod_base = OTHER; note = 2'-O-methyl-cytidine-3'-phosphate
aagatgatgtaatcacatgtc

SEQ ID NO: 827 - RNA, 19 nt, synthetic construct
  source 1..19: mol_type = other RNA
catgtgattacatcatctt

SEQ ID NO: 828 - RNA, 21 nt, synthetic construct
  source 1..21: mol_type = other RNA
  modified_base 1: mod_base = OTHER; note = 2'-O-methyl-adenosine-3'-thiophosphate-phosphate
  modified_base 2: mod_base = OTHER; note = 2'-fluoro-adenosine-3'-thiophosphate-phosphate
  modified_base 3: mod_base = OTHER; note = 2'-O-methyl-guanosine-3'-phosphate
  modified_base 4: mod_base = OTHER; note = 2'-fluoro-adenosine-3'-phosphate
  modified_base 5: mod_base = OTHER; note = 2'-O-methyl-uridine-3'-phosphate
  modified_base 6: mod_base = OTHER; note = 2'-fluoro-guanosine-3'-phosphate
  modified_base 7: mod_base = OTHER; note = 2'-O-methyl-adenosine-3'-phosphate
  modified_base 8: mod_base = OTHER; note = 2'-fluoro-uridine-3'-phosphate
  modified_base 9: mod_base = OTHER; note = 2'-O-methyl-guanosine-3'-phosphate
  modified_base 10: mod_base = OTHER; note = 2'-O-methyl-uridine-3'-phosphate
  modified_base 11: mod_base = OTHER; note = 2'-O-methyl-adenosine-3'-phosphate
  modified_base 12: mod_base = OTHER; note = 2'-fluoro-adenosine-3'-phosphate
  modified_base 13: mod_base = OTHER; note = 2'-O-methyl-uridine-3'-phosphate
  modified_base 14: mod_base = OTHER; note = 2'-fluoro-cytidine-3'-phosphate
  modified_base 15: mod_base = OTHER; note = 2'-O-methyl-adenosine-3'-phosphate
  modified_base 16: mod_base = OTHER; note = 2'-fluoro-cytidine-3'-phosphate
  modified_base 17: mod_base = OTHER; note = 2'-O-methyl-adenosine-3'-phosphate
  modified_base 18: mod_base = OTHER; note = 2'-fluoro-uridine-3'-phosphate
  modified_base 19: mod_base = OTHER; note = 2'-O-methyl-guanosine-3'-thiophosphate-phosphate
  modified_base 20: mod_base = OTHER; note = 2'-O-methyl-uridine-3'-thiophosphate-phosphate
  modified_base 21: mod_base = OTHER; note = 2'-O-methyl-cytidine-3'-phosphate
aagatgatgtaatcacatgtc

SEQ ID NO: 829 - RNA, 19 nt, synthetic construct
  source 1..19: mol_type = other RNA
catgtgattacatcatctt

SEQ ID NO: 830 - RNA, 21 nt, synthetic construct
  source 1..21: mol_type = other RNA
  modified_base 1: mod_base = OTHER; note = 2'-O-methyl-adenosine-3'-phosphate
  modified_base 2: mod_base = OTHER; note = 2'-deoxy-adenosine-3'-phosphate
  modified_base 3: mod_base = OTHER; note = 2'-O-methyl-guanosine-3'-phosphate
  modified_base 4: mod_base = OTHER; note = 2'-fluoro-adenosine-3'-phosphate
  modified_base 5: mod_base = OTHER; note = 2'-deoxy-uridine-3'-phosphate
  modified_base 6: mod_base = OTHER; note = 2'-fluoro-guanosine-3'-phosphate
  modified_base 7: mod_base = OTHER; note = 2'-deoxy-adenosine-3'-phosphate
  modified_base 8: mod_base = OTHER; note = 2'-fluoro-uridine-3'-phosphate
  modified_base 9: mod_base = OTHER; note = 2'-O-methyl-guanosine-3'-phosphate
  modified_base 10: mod_base = OTHER; note = 2'-O-methyl-uridine-3'-phosphate
  modified_base 11: mod_base = OTHER; note = 2'-O-methyl-adenosine-3'-phosphate
  modified_base 12: mod_base = OTHER; note = 2'-deoxy-adenosine-3'-phosphate
  modified_base 13: mod_base = OTHER; note = 2'-O-methyl-uridine-3'-phosphate
  modified_base 14: mod_base = OTHER; note = 2'-fluoro-cytidine-3'-phosphate
  modified_base 15: mod_base = OTHER; note = 2'-O-methyl-adenosine-3'-phosphate
  modified_base 16: mod_base = OTHER; note = 2'-fluoro-cytidine-3'-phosphate
  modified_base 17: mod_base = OTHER; note = 2'-O-methyl-adenosine-3'-phosphate
  modified_base 18: mod_base = OTHER; note = 2'-fluoro-uridine-3'-phosphate
  modified_base 19: mod_base = OTHER; note = 2'-O-methyl-guanosine-3'-phosphate
  modified_base 20: mod_base = OTHER; note = 2'-O-methyl-uridine-3'-phosphate
  modified_base 21: mod_base = OTHER; note = 2'-O-methyl-cytidine-3'-phosphate
aagatgatgtaatcacatgtc

SEQ ID NO: 831 - RNA, 19 nt, synthetic construct
  source 1..19: mol_type = other RNA
catgtgattacatcatctt

SEQ ID NO: 832 - RNA, 21 nt, synthetic construct
  source 1..21: mol_type = other RNA
  modified_base 1: mod_base = OTHER; note = 2'-O-methyl-adenosine-3'-phosphate
  modified_base 2: mod_base = OTHER; note = 2'-fluoro-adenosine-3'-phosphate
  modified_base 3: mod_base = OTHER; note = 2'-O-methyl-hypoxanthine-3'-phosphate
  modified_base 4: mod_base = OTHER; note = 2'-fluoro-adenosine-3'-phosphate
  modified_base 5: mod_base = OTHER; note = 2'-O-methyl-uridine-3'-phosphate
  modified_base 6: mod_base = OTHER; note = 2'-fluoro-guanosine-3'-phosphate
  modified_base 7: mod_base = OTHER; note = 2'-O-methyl-adenosine-3'-phosphate
  modified_base 8: mod_base = OTHER; note = 2'-fluoro-uridine-3'-phosphate
  modified_base 9: mod_base = OTHER; note = 2'-O-methyl-guanosine-3'-phosphate
  modified_base 10: mod_base = OTHER; note = 2'-O-methyl-uridine-3'-phosphate
  modified_base 11: mod_base = OTHER; note = 2'-O-methyl-adenosine-3'-phosphate
  modified_base 12: mod_base = OTHER; note = 2'-fluoro-adenosine-3'-phosphate
  modified_base 13: mod_base = OTHER; note = 2'-O-methyl-uridine-3'-phosphate
  modified_base 14: mod_base = OTHER; note = 2'-fluoro-cytidine-3'-phosphate
  modified_base 15: mod_base = OTHER; note = 2'-O-methyl-adenosine-3'-phosphate
  modified_base 16: mod_base = OTHER; note = 2'-fluoro-cytidine-3'-phosphate
  modified_base 17: mod_base = OTHER; note = 2'-O-methyl-adenosine-3'-phosphate
  modified_base 18: mod_base = OTHER; note = 2'-fluoro-uridine-3'-phosphate
  modified_base 19: mod_base = OTHER; note = 2'-O-methyl-guanosine-3'-phosphate
  modified_base 20: mod_base = OTHER; note = 2'-O-methyl-uridine-3'-phosphate
  modified_base 21: mod_base = OTHER; note = 2'-O-methyl-cytidine-3'-phosphate
aanatgatgtaatcacatgtc

SEQ ID NO: 833 - RNA, 19 nt, synthetic construct
  source 1..19: mol_type = other RNA
catgtgattacatcatctt

SEQ ID NO: 834 - RNA, 21 nt, synthetic construct
  source 1..21: mol_type = other RNA
  modified_base 1: mod_base = OTHER; note = 2'-O-methyl-adenosine-3'-phosphate
  modified_base 2: mod_base = OTHER; note = 2'-fluoro-adenosine-3'-phosphate
  modified_base 3: mod_base = OTHER; note = 2'-O-methyl-guanosine-3'-phosphate
  modified_base 4: mod_base = OTHER; note = 2'-fluoro-adenosine-3'-phosphate
  modified_base 5: mod_base = OTHER; note = 2'-O-methyl-uridine-3'-phosphate
  modified_base 6: mod_base = OTHER; note = 2'-fluoro-hypoxanthine-3'-phosphate
  modified_base 7: mod_base = OTHER; note = 2'-O-methyl-adenosine-3'-phosphate
  modified_base 8: mod_base = OTHER; note = 2'-fluoro-uridine-3'-phosphate
  modified_base 9: mod_base = OTHER; note = 2'-O-methyl-guanosine-3'-phosphate
  modified_base 10: mod_base = OTHER; note = 2'-O-methyl-uridine-3'-phosphate
  modified_base 11: mod_base = OTHER; note = 2'-O-methyl-adenosine-3'-phosphate
  modified_base 12: mod_base = OTHER; note = 2'-fluoro-adenosine-3'-phosphate
  modified_base 13: mod_base = OTHER; note = 2'-O-methyl-uridine-3'-phosphate
  modified_base 14: mod_base = OTHER; note = 2'-fluoro-cytidine-3'-phosphate
  modified_base 15: mod_base = OTHER; note = 2'-O-methyl-adenosine-3'-phosphate
  modified_base 16: mod_base = OTHER; note = 2'-fluoro-cytidine-3'-phosphate
  modified_base 17: mod_base = OTHER; note = 2'-O-methyl-adenosine-3'-phosphate
  modified_base 18: mod_base = OTHER; note = 2'-fluoro-uridine-3'-phosphate
  modified_base 19: mod_base = OTHER; note = 2'-O-methyl-guanosine-3'-phosphate
  modified_base 20: mod_base = OTHER; note = 2'-O-methyl-uridine-3'-phosphate
  modified_base 21: mod_base = OTHER; note = 2'-O-methyl-cytidine-3'-phosphate
aagatnatgtaatcacatgtc

SEQ ID NO: 835 - RNA, 19 nt, synthetic construct
  source 1..19: mol_type = other RNA
  modified_base 1: mod_base = OTHER; note = 2'-O-methyl-cytidine-3'-phosphate
  modified_base 2: mod_base = OTHER; note = 2'-O-methyl-adenosine-3'-phosphate
  modified_base 3: mod_base = OTHER; note = 2'-O-methyl-uridine-3'-phosphate
  modified_base 4: mod_base = OTHER; note = 2'-O-methyl-guanosine-3'-phosphate
  modified_base 5: mod_base = OTHER; note = 2'-fluoro-uridine-3'-phosphate
  modified_base 6: mod_base = OTHER; note = 2'-fluoro-guanosine-3'-phosphate
  modified_base 7: mod_base = OTHER; note = 2'-fluoro-adenosine-3'-phosphate
  modified_base 8: mod_base = OTHER; note = 2'-fluoro-uridine-3'-phosphate
  modified_base 9: mod_base = OTHER; note = 2'-fluoro-uridine-3'-phosphate
  modified_base 10: mod_base = OTHER; note = 2'-fluoro-adenosine-3'-phosphate
  modified_base 11: mod_base = OTHER; note = 2'-O-methyl-cytidine-3'-phosphate
  modified_base 12: mod_base = OTHER; note = 2'-O-methyl-adenosine-3'-phosphate
  modified_base 13: mod_base = OTHER; note = 2'-O-methyl-uridine-3'-phosphate
  modified_base 14: mod_base = OTHER; note = 2'-O-methyl-cytidine-3'-phosphate
  modified_base 15: mod_base = OTHER; note = 2'-O-methyl-adenosine-3'-phosphate
  modified_base 16: mod_base = OTHER; note = 2'-O-methyl-uridine-3'-phosphate
  modified_base 17: mod_base = OTHER; note = 2'-O-methyl-cytidine-3'-phosphate
  modified_base 18: mod_base = OTHER; note = 2'-O-methyl-uridine-3'-phosphate
  modified_base 19: mod_base = OTHER; note = 2'-O-methyl-uridine-3'-phosphate
catgtgattacatcatctt

SEQ ID NO: 836 - RNA, 21 nt, synthetic construct
  source 1..21: mol_type = other RNA
aagatgatgtaatcacatgtc

SEQ ID NO: 837 - RNA, 19 nt, synthetic construct
  source 1..19: mol_type = other RNA
  modified_base 1: mod_base = OTHER; note = 2'-O-methyl-cytidine-3'-phosphate
  modified_base 2: mod_base = OTHER; note = 2'-O-methyl-adenosine-3'-phosphate
  modified_base 3: mod_base = OTHER; note = 2'-O-methyl-uridine-3'-phosphate
  modified_base 4: mod_base = OTHER; note = 2'-O-methyl-guanosine-3'-phosphate
  modified_base 5: mod_base = OTHER; note = 2'-O-methyl-uridine-3'-phosphate
  modified_base 6: mod_base = OTHER; note = 2'-fluoro-guanosine-3'-phosphate
  modified_base 7: mod_base = OTHER; note = 2'-fluoro-adenosine-3'-phosphate
  modified_base 8: mod_base = OTHER; note = 2'-fluoro-uridine-3'-phosphate
  modified_base 9: mod_base = OTHER; note = 2'-fluoro-uridine-3'-phosphate
  modified_base 10: mod_base = OTHER; note = 2'-fluoro-adenosine-3'-phosphate
  modified_base 11: mod_base = OTHER; note = 2'-O-methyl-cytidine-3'-phosphate
  modified_base 12: mod_base = OTHER; note = 2'-O-methyl-adenosine-3'-phosphate
  modified_base 13: mod_base = OTHER; note = 2'-O-methyl-uridine-3'-phosphate
  modified_base 14: mod_base = OTHER; note = 2'-O-methyl-cytidine-3'-phosphate
  modified_base 15: mod_base = OTHER; note = 2'-O-methyl-adenosine-3'-phosphate
  modified_base 16: mod_base = OTHER; note = 2'-O-methyl-uridine-3'-phosphate
  modified_base 17: mod_base = OTHER; note = 2'-O-methyl-cytidine-3'-phosphate
  modified_base 18: mod_base = OTHER; note = 2'-O-methyl-uridine-3'-phosphate
  modified_base 19: mod_base = OTHER; note = 2'-O-methyl-uridine-3'-phosphate
catgtgattacatcatctt

SEQ ID NO: 838 - RNA, 21 nt, synthetic construct
  source 1..21: mol_type = other RNA
aagatgatgtaatcacatgtc

SEQ ID NO: 839 - RNA, 19 nt, synthetic construct
  source 1..19: mol_type = other RNA
  modified_base 1: mod_base = OTHER; note = 2'-O-methyl-cytidine-3'-phosphate
  modified_base 2: mod_base = OTHER; note = 2'-O-methyl-adenosine-3'-phosphate
  modified_base 3: mod_base = OTHER; note = 2'-O-methyl-uridine-3'-phosphate
  modified_base 4: mod_base = OTHER; note = 2'-O-methyl-guanosine-3'-phosphate
  modified_base 5: mod_base = OTHER; note = 2'-O-methyl-uridine-3'-phosphate
  modified_base 6: mod_base = OTHER; note = 2'-O-methyl-guanosine-3'-phosphate
  modified_base 7: mod_base = OTHER; note = 2'-fluoro-adenosine-3'-phosphate
  modified_base 8: mod_base = OTHER; note = 2'-fluoro-uridine-3'-phosphate
  modified_base 9: mod_base = OTHER; note = 2'-fluoro-uridine-3'-phosphate
  modified_base 10: mod_base = OTHER; note = 2'-fluoro-adenosine-3'-phosphate
  modified_base 11: mod_base = OTHER; note = 2'-O-methyl-cytidine-3'-phosphate
  modified_base 12: mod_base = OTHER; note = 2'-O-methyl-adenosine-3'-phosphate
  modified_base 13: mod_base = OTHER; note = 2'-O-methyl-uridine-3'-phosphate
  modified_base 14: mod_base = OTHER; note = 2'-O-methyl-cytidine-3'-phosphate
  modified_base 15: mod_base = OTHER; note = 2'-O-methyl-adenosine-3'-phosphate
  modified_base 16: mod_base = OTHER; note = 2'-O-methyl-uridine-3'-phosphate
  modified_base 17: mod_base = OTHER; note = 2'-O-methyl-cytidine-3'-phosphate
  modified_base 18: mod_base = OTHER; note = 2'-O-methyl-uridine-3'-phosphate
  modified_base 19: mod_base = OTHER; note = 2'-O-methyl-uridine-3'-phosphate
catgtgattacatcatctt

SEQ ID NO: 840 - RNA, 21 nt, synthetic construct
  source 1..21: mol_type = other RNA
aagatgatgtaatcacatgtc

SEQ ID NO: 841 - RNA, 19 nt, synthetic construct
  source 1..19: mol_type = other RNA
  modified_base 1: mod_base = OTHER; note = 2'-O-methyl-cytidine-3'-phosphate
  modified_base 2: mod_base = OTHER; note = 2'-O-methyl-adenosine-3'-phosphate
  modified_base 3: mod_base = OTHER; note = 2'-O-methyl-uridine-3'-phosphate
  modified_base 4: mod_base = OTHER; note = 2'-O-methyl-guanosine-3'-phosphate
  modified_base 5: mod_base = OTHER; note = 2'-O-methyl-uridine-3'-phosphate
  modified_base 6: mod_base = OTHER; note = 2'-O-methyl-guanosine-3'-phosphate
  modified_base 7: mod_base = OTHER; note = 2'-O-methyl-adenosine-3'-phosphate
  modified_base 8: mod_base = OTHER; note = 2'-fluoro-uridine-3'-phosphate
  modified_base 9: mod_base = OTHER; note = 2'-fluoro-uridine-3'-phosphate
  modified_base 10: mod_base = OTHER; note = 2'-fluoro-adenosine-3'-phosphate
  modified_base 11: mod_base = OTHER; note = 2'-O-methyl-cytidine-3'-phosphate
  modified_base 12: mod_base = OTHER; note = 2'-O-methyl-adenosine-3'-phosphate
  modified_base 13: mod_base = OTHER; note = 2'-O-methyl-uridine-3'-phosphate
  modified_base 14: mod_base = OTHER; note = 2'-O-methyl-cytidine-3'-phosphate
  modified_base 15: mod_base = OTHER; note = 2'-O-methyl-adenosine-3'-phosphate
  modified_base 16: mod_base = OTHER; note = 2'-O-methyl-uridine-3'-phosphate
  modified_base 17: mod_base = OTHER; note = 2'-O-methyl-cytidine-3'-phosphate
  modified_base 18: mod_base = OTHER; note = 2'-O-methyl-uridine-3'-phosphate
  modified_base 19: mod_base = OTHER; note = 2'-O-methyl-uridine-3'-phosphate
catgtgattacatcatctt

SEQ ID NO: 842 - RNA, 21 nt, synthetic construct
  source 1..21: mol_type = other RNA
aagatgatgtaatcacatgtc

SEQ ID NO: 843 - RNA, 19 nt, synthetic construct
  source 1..19: mol_type = other RNA
  modified_base 1: mod_base = OTHER; note = 2'-O-methyl-cytidine-3'-phosphate
  modified_base 2: mod_base = OTHER; note = 2'-O-methyl-adenosine-3'-phosphate
  modified_base 3: mod_base = OTHER; note = 2'-O-methyl-uridine-3'-phosphate
  modified_base 4: mod_base = OTHER; note = 2'-O-methyl-guanosine-3'-phosphate
  modified_base 5: mod_base = OTHER; note = 2'-fluoro-uridine-3'-phosphate
  modified_base 6: mod_base = OTHER; note = 2'-O-methyl-guanosine-3'-phosphate
  modified_base 7: mod_base = OTHER; note = 2'-O-methyl-adenosine-3'-phosphate
  modified_base 8: mod_base = OTHER; note = 2'-O-methyl-uridine-3'-phosphate
  modified_base 9: mod_base = OTHER; note = 2'-fluoro-uridine-3'-phosphate
  modified_base 10: mod_base = OTHER; note = 2'-fluoro-adenosine-3'-phosphate
  modified_base 11: mod_base = OTHER; note = 2'-O-methyl-cytidine-3'-phosphate
  modified_base 12: mod_base = OTHER; note = 2'-O-methyl-adenosine-3'-phosphate
  modified_base 13: mod_base = OTHER; note = 2'-O-methyl-uridine-3'-phosphate
  modified_base 14: mod_base = OTHER; note = 2'-O-methyl-cytidine-3'-phosphate
  modified_base 15: mod_base = OTHER; note = 2'-O-methyl-adenosine-3'-phosphate
  modified_base 16: mod_base = OTHER; note = 2'-O-methyl-uridine-3'-phosphate
  modified_base 17: mod_base = OTHER; note = 2'-O-methyl-cytidine-3'-phosphate
  modified_base 18: mod_base = OTHER; note = 2'-O-methyl-uridine-3'-phosphate
  modified_base 19: mod_base = OTHER; note = 2'-O-methyl-uridine-3'-phosphate
catgtgattacatcatctt

SEQ ID NO: 844 - RNA, 21 nt, synthetic construct
  source 1..21: mol_type = other RNA
aagatgatgtaatcacatgtc

SEQ ID NO: 845 - RNA, 19 nt, synthetic construct
  source 1..19: mol_type = other RNA
  modified_base 1: mod_base = OTHER; note = 2'-O-methyl-cytidine-3'-phosphate
  modified_base 2: mod_base = OTHER; note = 2'-O-methyl-adenosine-3'-phosphate
  modified_base 3: mod_base = OTHER; note = 2'-O-methyl-uridine-3'-phosphate
  modified_base 4: mod_base = OTHER; note = 2'-O-methyl-guanosine-3'-phosphate
  modified_base 5: mod_base = OTHER; note = 2'-fluoro-uridine-3'-phosphate
  modified_base 6: mod_base = OTHER; note = 2'-fluoro-guanosine-3'-phosphate
  modified_base 7: mod_base = OTHER; note = 2'-O-methyl-adenosine-3'-phosphate
  modified_base 8: mod_base = OTHER; note = 2'-O-methyl-uridine-3'-phosphate
  modified_base 9: mod_base = OTHER; note = 2'-O-methyl-uridine-3'-phosphate
  modified_base 10: mod_base = OTHER; note = 2'-fluoro-adenosine-3'-phosphate
  modified_base 11: mod_base = OTHER; note = 2'-O-methyl-cytidine-3'-phosphate
  modified_base 12: mod_base = OTHER; note = 2'-O-methyl-adenosine-3'-phosphate
  modified_base 13: mod_base = OTHER; note = 2'-O-methyl-uridine-3'-phosphate
  modified_base 14: mod_base = OTHER; note = 2'-O-methyl-cytidine-3'-phosphate
  modified_base 15: mod_base = OTHER; note = 2'-O-methyl-adenosine-3'-phosphate
  modified_base 16: mod_base = OTHER; note = 2'-O-methyl-uridine-3'-phosphate
  modified_base 17: mod_base = OTHER; note = 2'-O-methyl-cytidine-3'-phosphate
  modified_base 18: mod_base = OTHER; note = 2'-O-methyl-uridine-3'-phosphate
  modified_base 19: mod_base = OTHER; note = 2'-O-methyl-uridine-3'-phosphate
catgtgattacatcatctt

SEQ ID NO: 846 - RNA, 21 nt, synthetic construct
  source 1..21: mol_type = other RNA
aagatgatgtaatcacatgtc

SEQ ID NO: 847 - RNA, 19 nt, synthetic construct
  source 1..19: mol_type = other RNA
  modified_base 1: mod_base = OTHER; note = 2'-O-methyl-cytidine-3'-phosphate
  modified_base 2: mod_base = OTHER; note = 2'-O-methyl-adenosine-3'-phosphate
  modified_base 3: mod_base = OTHER; note = 2'-O-methyl-uridine-3'-phosphate
  modified_base 4: mod_base = OTHER; note = 2'-O-methyl-guanosine-3'-phosphate
  modified_base 5: mod_base = OTHER; note = 2'-fluoro-uridine-3'-phosphate
  modified_base 6: mod_base = OTHER; note = 2'-fluoro-guanosine-3'-phosphate
  modified_base 7: mod_base = OTHER; note = 2'-fluoro-adenosine-3'-phosphate
  modified_base 8: mod_base = OTHER; note = 2'-O-methyl-uridine-3'-phosphate
  modified_base 9: mod_base = OTHER; note = 2'-O-methyl-uridine-3'-phosphate
  modified_base 10: mod_base = OTHER; note = 2'-O-methyl-adenosine-3'-phosphate
  modified_base 11: mod_base = OTHER; note = 2'-O-methyl-cytidine-3'-phosphate
  modified_base 12: mod_base = OTHER; note = 2'-O-methyl-adenosine-3'-phosphate
  modified_base 13: mod_base = OTHER; note = 2'-O-methyl-uridine-3'-phosphate
  modified_base 14: mod_base = OTHER; note = 2'-O-methyl-cytidine-3'-phosphate
  modified_base 15: mod_base = OTHER; note = 2'-O-methyl-adenosine-3'-phosphate
  modified_base 16: mod_base = OTHER; note = 2'-O-methyl-uridine-3'-phosphate
  modified_base 17: mod_base = OTHER; note = 2'-O-methyl-cytidine-3'-phosphate
  modified_base 18: mod_base = OTHER; note = 2'-O-methyl-uridine-3'-phosphate
  modified_base 19: mod_base = OTHER; note = 2'-O-methyl-uridine-3'-phosphate
catgtgattacatcatctt

SEQ ID NO: 848 - RNA, 21 nt, synthetic construct
  source 1..21: mol_type = other RNA
aagatgatgtaatcacatgtc

SEQ ID NO: 849 - RNA, 19 nt, synthetic construct
  source 1..19: mol_type = other RNA
  modified_base 1: mod_base = OTHER; note = 2'-O-methyl-cytidine-3'-phosphate
  modified_base 2: mod_base = OTHER; note = 2'-O-methyl-adenosine-3'-phosphate
  modified_base 3: mod_base = OTHER; note = 2'-O-methyl-uridine-3'-phosphate
  modified_base 4: mod_base = OTHER; note = 2'-O-methyl-guanosine-3'-phosphate
  modified_base 5: mod_base = OTHER; note = 2'-fluoro-uridine-3'-phosphate
  modified_base 6: mod_base = OTHER; note = 2'-fluoro-guanosine-3'-phosphate
  modified_base 7: mod_base = OTHER; note = 2'-fluoro-adenosine-3'-phosphate
  modified_base 8: mod_base = OTHER; note = 2'-fluoro-uridine-3'-phosphate
  modified_base 9: mod_base = OTHER; note = 2'-O-methyl-uridine-3'-phosphate
  modified_base 10: mod_base = OTHER; note = 2'-O-methyl-adenosine-3'-phosphate
  modified_base 11: mod_base = OTHER; note = 2'-O-methyl-cytidine-3'-phosphate
  modified_base 12: mod_base = OTHER; note = 2'-O-methyl-adenosine-3'-phosphate
  modified_base 13: mod_base = OTHER; note = 2'-O-methyl-uridine-3'-phosphate
  modified_base 14: mod_base = OTHER; note = 2'-O-methyl-cytidine-3'-phosphate
  modified_base 15: mod_base = OTHER; note = 2'-O-methyl-adenosine-3'-phosphate
  modified_base 16: mod_base = OTHER; note = 2'-O-methyl-uridine-3'-phosphate
  modified_base 17: mod_base = OTHER; note = 2'-O-methyl-cytidine-3'-phosphate
  modified_base 18: mod_base = OTHER; note = 2'-O-methyl-uridine-3'-phosphate
  modified_base 19: mod_base = OTHER; note = 2'-O-methyl-uridine-3'-phosphate
catgtgattacatcatctt

SEQ ID NO: 850 - RNA, 21 nt, synthetic construct
  source 1..21: mol_type = other RNA
aagatgatgtaatcacatgtc

SEQ ID NO: 851 - RNA, 19 nt, synthetic construct
  source 1..19: mol_type = other RNA
  modified_base 1: mod_base = OTHER; note = 2'-O-methyl-cytidine-3'-phosphate
  modified_base 2: mod_base = OTHER; note = 2'-O-methyl-adenosine-3'-phosphate
  modified_base 3: mod_base = OTHER; note = 2'-O-methyl-uridine-3'-phosphate
  modified_base 4: mod_base = OTHER; note = 2'-O-methyl-guanosine-3'-phosphate
  modified_base 5: mod_base = OTHER; note = 2'-fluoro-uridine-3'-phosphate
  modified_base 6: mod_base = OTHER; note = 2'-fluoro-guanosine-3'-phosphate
  modified_base 7: mod_base = OTHER; note = 2'-fluoro-adenosine-3'-phosphate
  modified_base 8: mod_base = OTHER; note = 2'-fluoro-uridine-3'-phosphate
  modified_base 9: mod_base = OTHER; note = 2'-fluoro-uridine-3'-phosphate
  modified_base 10: mod_base = OTHER; note = 2'-O-methyl-adenosine-3'-phosphate
  modified_base 11: mod_base = OTHER; note = 2'-O-methyl-cytidine-3'-phosphate
  modified_base 12: mod_base = OTHER; note = 2'-O-methyl-adenosine-3'-phosphate
  modified_base 13: mod_base = OTHER; note = 2'-O-methyl-uridine-3'-phosphate
  modified_base 14: mod_base = OTHER; note = 2'-O-methyl-cytidine-3'-phosphate
  modified_base 15: mod_base = OTHER; note = 2'-O-methyl-adenosine-3'-phosphate
  modified_base 16: mod_base = OTHER; note = 2'-O-methyl-uridine-3'-phosphate
  modified_base 17: mod_base = OTHER; note = 2'-O-methyl-cytidine-3'-phosphate
  modified_base 18: mod_base = OTHER; note = 2'-O-methyl-uridine-3'-phosphate
  modified_base 19: mod_base = OTHER; note = 2'-O-methyl-uridine-3'-phosphate
catgtgattacatcatctt

SEQ ID NO: 852 - RNA, 21 nt, synthetic construct
  source 1..21: mol_type = other RNA
aagatgatgtaatcacatgtc

SEQ ID NO: 853 - RNA, 19 nt, synthetic construct
  source 1..19: mol_type = other RNA
  modified_base 1: mod_base = OTHER; note = 2'-O-methyl-cytidine-3'-thiophosphate-phosphate
  modified_base 2: mod_base = OTHER; note = 2'-O-methyl-adenosine-3'-phosphate
  modified_base 3: mod_base = OTHER; note = 2'-O-methyl-uridine-3'-phosphate
  modified_base 4: mod_base = OTHER; note = 2'-O-methyl-guanosine-3'-phosphate
  modified_base 5: mod_base = OTHER; note = 2'-fluoro-uridine-3'-phosphate
  modified_base 6: mod_base = OTHER; note = 2'-fluoro-guanosine-3'-phosphate
  modified_base 7: mod_base = OTHER; note = 2'-fluoro-adenosine-3'-phosphate
  modified_base 8: mod_base = OTHER; note = 2'-fluoro-uridine-3'-phosphate
  modified_base 9: mod_base = OTHER; note = 2'-fluoro-uridine-3'-phosphate
  modified_base 10: mod_base = OTHER; note = 2'-fluoro-adenosine-3'-phosphate
  modified_base 11: mod_base = OTHER; note = 2'-O-methyl-cytidine-3'-phosphate
  modified_base 12: mod_base = OTHER; note = 2'-O-methyl-adenosine-3'-phosphate
  modified_base 13: mod_base = OTHER; note = 2'-O-methyl-uridine-3'-phosphate
  modified_base 14: mod_base = OTHER; note = 2'-O-methyl-cytidine-3'-phosphate
  modified_base 15: mod_base = OTHER; note = 2'-O-methyl-adenosine-3'-phosphate
  modified_base 16: mod_base = OTHER; note = 2'-O-methyl-uridine-3'-phosphate
  modified_base 17: mod_base = OTHER; note = 2'-O-methyl-cytidine-3'-phosphate
  modified_base 18: mod_base = OTHER; note = 2'-O-methyl-uridine-3'-phosphate
  modified_base 19: mod_base = OTHER; note = 2'-O-methyl-uridine-3'-phosphate
catgtgattacatcatctt

SEQ ID NO: 854 - RNA, 21 nt, synthetic construct
  source 1..21: mol_type = other RNA
aagatgatgtaatcacatgtc

SEQ ID NO: 855 - RNA, 19 nt, synthetic construct
  source 1..19: mol_type = other RNA
  modified_base 1: mod_base = OTHER; note = 2'-O-methyl-cytidine-3'-thiophosphate-phosphate
  modified_base 2: mod_base = OTHER; note = 2'-O-methyl-adenosine-3'-thiophosphate-phosphate
  modified_base 3: mod_base = OTHER; note = 2'-O-methyl-uridine-3'-phosphate
  modified_base 4: mod_base = OTHER; note = 2'-O-methyl-guanosine-3'-phosphate
  modified_base 5: mod_base = OTHER; note = 2'-fluoro-uridine-3'-phosphate
  modified_base 6: mod_base = OTHER; note = 2'-fluoro-guanosine-3'-phosphate
  modified_base 7: mod_base = OTHER; note = 2'-fluoro-adenosine-3'-phosphate
  modified_base 8: mod_base = OTHER; note = 2'-fluoro-uridine-3'-phosphate
  modified_base 9: mod_base = OTHER; note = 2'-fluoro-uridine-3'-phosphate
  modified_base 10: mod_base = OTHER; note = 2'-fluoro-adenosine-3'-phosphate
  modified_base 11: mod_base = OTHER; note = 2'-O-methyl-cytidine-3'-phosphate
  modified_base 12: mod_base = OTHER; note = 2'-O-methyl-adenosine-3'-phosphate
  modified_base 13: mod_base = OTHER; note = 2'-O-methyl-uridine-3'-phosphate
  modified_base 14: mod_base = OTHER; note = 2'-O-methyl-cytidine-3'-phosphate
  modified_base 15: mod_base = OTHER; note = 2'-O-methyl-adenosine-3'-phosphate
  modified_base 16: mod_base = OTHER; note = 2'-O-methyl-uridine-3'-phosphate
  modified_base 17: mod_base = OTHER; note = 2'-O-methyl-cytidine-3'-phosphate
  modified_base 18: mod_base = OTHER; note = 2'-O-methyl-uridine-3'-phosphate
  modified_base 19: mod_base = OTHER; note = 2'-O-methyl-uridine-3'-phosphate
catgtgattacatcatctt

SEQ ID NO: 856 - RNA, 21 nt, synthetic construct
  source 1..21: mol_type = other RNA
aagatgatgtaatcacatgtc

SEQ ID NO: 857 - RNA, 19 nt, synthetic construct
  source 1..19: mol_type = other RNA
  modified_base 1: mod_base = OTHER; note = 2'-O-methyl-cytidine-3'-thiophosphate-phosphate
  modified_base 2: mod_base = OTHER; note = 2'-O-methyl-adenosine-3'-thiophosphate-phosphate
  modified_base 3: mod_base = OTHER; note = 2'-O-methyl-uridine-3'-phosphate
  modified_base 4: mod_base = OTHER; note = 2'-O-methyl-guanosine-3'-phosphate
  modified_base 5: mod_base = OTHER; note = 2'-fluoro-uridine-3'-phosphate
  modified_base 6: mod_base = OTHER; note = 2'-fluoro-guanosine-3'-phosphate
  modified_base 7: mod_base = OTHER; note = 2'-fluoro-adenosine-3'-phosphate
  modified_base 8: mod_base = OTHER; note = 2'-fluoro-uridine-3'-phosphate
  modified_base 9: mod_base = OTHER; note = 2'-fluoro-uridine-3'-phosphate
  modified_base 10: mod_base = OTHER; note = 2'-fluoro-adenosine-3'-phosphate
  modified_base 11: mod_base = OTHER; note = 2'-O-methyl-cytidine-3'-phosphate
  modified_base 12: mod_base = OTHER; note = 2'-O-methyl-adenosine-3'-phosphate
  modified_base 13: mod_base = OTHER; note = 2'-O-methyl-uridine-3'-phosphate
  modified_base 14: mod_base = OTHER; note = 2'-O-methyl-cytidine-3'-phosphate
  modified_base 15: mod_base = OTHER; note = 2'-O-methyl-adenosine-3'-phosphate
  modified_base 16: mod_base = OTHER; note = 2'-O-methyl-uridine-3'-phosphate
  modified_base 17: mod_base = OTHER; note = 2'-O-methyl-cytidine-3'-phosphate
  modified_base 18: mod_base = OTHER; note = 2'-O-methyl-uridine-3'-phosphate
  modified_base 19: mod_base = OTHER; note = 2'-O-methyl-uridine-3'-phosphate
catgtgattacatcatctt

SEQ ID NO: 858 - RNA, 21 nt, synthetic construct
  source 1..21: mol_type = other RNA
  modified_base 1: mod_base = OTHER; note = 2'-O-methyl-adenosine-3'-thiophosphate-phosphate
  modified_base 2: mod_base = OTHER; note = 2'-fluoro-adenosine-3'-thiophosphate-phosphate
  modified_base 3: mod_base = OTHER; note = 2'-O-methyl-guanosine-3'-phosphate
  modified_base 4: mod_base = OTHER; note = 2'-fluoro-adenosine-3'-phosphate
  modified_base 5: mod_base = OTHER; note = 2'-O-methyl-uridine-3'-phosphate
  modified_base 6: mod_base = OTHER; note = 2'-fluoro-guanosine-3'-phosphate
  modified_base 7: mod_base = OTHER; note = 2'-O-methyl-adenosine-3'-phosphate
  modified_base 8: mod_base = OTHER; note = 2'-fluoro-uridine-3'-phosphate
  modified_base 9: mod_base = OTHER; note = 2'-O-methyl-guanosine-3'-phosphate
  modified_base 10: mod_base = OTHER; note = 2'-O-methyl-uridine-3'-phosphate
  modified_base 11: mod_base = OTHER; note = 2'-O-methyl-adenosine-3'-phosphate
  modified_base 12: mod_base = OTHER; note = 2'-fluoro-adenosine-3'-phosphate
  modified_base 13: mod_base = OTHER; note = 2'-O-methyl-uridine-3'-phosphate
  modified_base 14: mod_base = OTHER; note = 2'-fluoro-cytidine-3'-phosphate
  modified_base 15: mod_base = OTHER; note = 2'-O-methyl-adenosine-3'-phosphate
  modified_base 16: mod_base = OTHER; note = 2'-fluoro-cytidine-3'-phosphate
  modified_base 17: mod_base = OTHER; note = 2'-O-methyl-adenosine-3'-phosphate
  modified_base 18: mod_base = OTHER; note = 2'-fluoro-uridine-3'-phosphate
  modified_base 19: mod_base = OTHER; note = 2'-O-methyl-guanosine-3'-thiophosphate-phosphate
  modified_base 20: mod_base = OTHER; note = 2'-O-methyl-uridine-3'-thiophosphate-phosphate
  modified_base 21: mod_base = OTHER; note = 2'-O-methyl-cytidine-3'-phosphate
aagatgatgtaatcacatgtc

SEQ ID NO: 859 - RNA, 19 nt, synthetic construct
  source 1..19: mol_type = other RNA
  modified_base 1: mod_base = OTHER; note = 2'-O-methyl-guanosine-3'-thiophosphate-phosphate
  modified_base 2: mod_base = OTHER; note = 2'-O-methyl-cytidine-3'-thiophosphate-phosphate
  modified_base 3: mod_base = OTHER; note = 2'-O-methyl-uridine-3'-phosphate
  modified_base 4: mod_base = OTHER; note = 2'-O-methyl-guanosine-3'-phosphate
  modified_base 5: mod_base = OTHER; note = 2'-O-methyl-adenosine-3'-phosphate
  modified_base 6: mod_base = OTHER; note = 2'-O-methyl-guanosine-3'-phosphate
  modified_base 7: mod_base = OTHER; note = 2'-fluoro-adenosine-3'-phosphate
  modified_base 8: mod_base = OTHER; note = 2'-fluoro-cytidine-3'-phosphate
  modified_base 9: mod_base = OTHER; note = 2'-fluoro-uridine-3'-phosphate
  modified_base 10: mod_base = OTHER; note = 2'-O-methyl-cytidine-3'-phosphate
  modified_base 11: mod_base = OTHER; note = 2'-O-methyl-uridine-3'-phosphate
  modified_base 12: mod_base = OTHER; note = 2'-O-methyl-guanosine-3'-phosphate
  modified_base 13: mod_base = OTHER; note = 2'-O-methyl-guanosine-3'-phosphate
  modified_base 14: mod_base = OTHER; note = 2'-O-methyl-cytidine-3'-phosphate
  modified_base 15: mod_base = OTHER; note = 2'-O-methyl-uridine-3'-phosphate
  modified_base 16: mod_base = OTHER; note = 2'-O-methyl-uridine-3'-phosphate
  modified_base 17: mod_base = OTHER; note = 2'-O-methyl-adenosine-3'-phosphate
  modified_base 18: mod_base = OTHER; note = 2'-O-methyl-uridine-3'-phosphate
  modified_base 19: mod_base = OTHER; note = 2'-O-methyl-uridine-3'-phosphate
gctgagactctggcttatt

SEQ ID NO: 860 - RNA, 21 nt, synthetic construct
  source 1..21: mol_type = other RNA
  modified_base 1: mod_base = OTHER; note = 2'-O-methyl-adenosine-3'-thiophosphate-phosphate
  modified_base 2: mod_base = OTHER; note = 2'-fluoro-adenosine-3'-thiophosphate-phosphate
  modified_base 3: mod_base = OTHER; note = 2'-O-methyl-uridine-3'-phosphate
  modified_base 4: mod_base = OTHER; note = 2'-O-methyl-adenosine-3'-phosphate
  modified_base 5: mod_base = OTHER; note = 2'-O-methyl-adenosine-3'-phosphate
  modified_base 6: mod_base = OTHER; note = 2'-O-methyl-guanosine-3'-phosphate
  modified_base 7: mod_base = OTHER; note = 2'-O-methyl-cytidine-3'-phosphate
  modified_base 8: mod_base = OTHER; note = 2'-O-methyl-cytidine-3'-phosphate
  modified_base 9: mod_base = OTHER; note = 2'-O-methyl-adenosine-3'-phosphate
  modified_base 10: mod_base = OTHER; note = 2'-O-methyl-guanosine-3'-phosphate
  modified_base 11: mod_base = OTHER; note = 2'-O-methyl-adenosine-3'-phosphate
  modified_base 12: mod_base = OTHER; note = 2'-O-methyl-guanosine-3'-phosphate
  modified_base 13: mod_base = OTHER; note = 2'-O-methyl-uridine-3'-phosphate
  modified_base 14: mod_base = OTHER; note = 2'-fluoro-cytidine-3'-phosphate
  modified_base 15: mod_base = OTHER; note = 2'-O-methyl-uridine-3'-phosphate
  modified_base 16: mod_base = OTHER; note = 2'-O-methyl-cytidine-3'-phosphate
  modified_base 17: mod_base = OTHER; note = 2'-O-methyl-adenosine-3'-phosphate
  modified_base 18: mod_base = OTHER; note = 2'-O-methyl-guanosine-3'-phosphate
  modified_base 19: mod_base = OTHER; note = 2'-O-methyl-cytidine-3'-thiophosphate-phosphate
  modified_base 20: mod_base = OTHER; note = 2'-O-methyl-cytidine-3'-thiophosphate-phosphate
  modified_base 21: mod_base = OTHER; note = 2'-O-methyl-adenosine-3'-phosphate
aataagccagagtctcagcca

SEQ ID NO: 861 - RNA, 19 nt, synthetic construct
  source 1..19: mol_type = other RNA
  modified_base 1: mod_base = OTHER; note = 2'-O-methyl-guanosine-3'-thiophosphate-phosphate
  modified_base 2: mod_base = OTHER; note = 2'-O-methyl-cytidine-3'-thiophosphate-phosphate
  modified_base 3: mod_base = OTHER; note = 2'-O-methyl-uridine-3'-phosphate
  modified_base 4: mod_base = OTHER; note = 2'-O-methyl-guanosine-3'-phosphate
  modified_base 5: mod_base = OTHER; note = 2'-O-methyl-adenosine-3'-phosphate
  modified_base 6: mod_base = OTHER; note = 2'-O-methyl-guanosine-3'-phosphate
  modified_base 7: mod_base = OTHER; note = 2'-fluoro-adenosine-3'-phosphate
  modified_base 8: mod_base = OTHER; note = 2'-fluoro-cytidine-3'-phosphate
  modified_base 9: mod_base = OTHER; note = 2'-fluoro-uridine-3'-phosphate
  modified_base 10: mod_base = OTHER; note = 2'-O-methyl-cytidine-3'-phosphate
  modified_base 11: mod_base = OTHER; note = 2'-O-methyl-uridine-3'-phosphate
  modified_base 12: mod_base = OTHER; note = 2'-O-methyl-guanosine-3'-phosphate
  modified_base 13: mod_base = OTHER; note = 2'-O-methyl-guanosine-3'-phosphate
  modified_base 14: mod_base = OTHER; note = 2'-O-methyl-cytidine-3'-phosphate
  modified_base 15: mod_base = OTHER; note = 2'-O-methyl-uridine-3'-phosphate
  modified_base 16: mod_base = OTHER; note = 2'-O-methyl-uridine-3'-phosphate
  modified_base 17: mod_base = OTHER; note = 2'-O-methyl-adenosine-3'-phosphate
  modified_base 18: mod_base = OTHER; note = 2'-O-methyl-uridine-3'-phosphate
  modified_base 19: mod_base = OTHER; note = 2'-O-methyl-uridine-3'-phosphate
gctgagactctggcttatt

SEQ ID NO: 862 - RNA, 21 nt, synthetic construct
  source 1..21: mol_type = other RNA
  modified_base 1: mod_base = OTHER; note = 2'-O-methyl-adenosine-3'-thiophosphate-phosphate
  modified_base 2: mod_base = OTHER; note = 2'-fluoro-adenosine-3'-thiophosphate-phosphate
  modified_base 3: mod_base = OTHER; note = 2'-O-methyl-uridine-3'-phosphate
  modified_base 4: mod_base = OTHER; note = 2'-O-methyl-adenosine-3'-phosphate
  modified_base 5: mod_base = OTHER; note = 2'-O-methyl-adenosine-3'-phosphate
  modified_base 6: mod_base = OTHER; note = 2'-O-methyl-guanosine-3'-phosphate
  modified_base 7: mod_base = OTHER; note = 2'-O-methyl-cytidine-3'-phosphate
  modified_base 8: mod_base = OTHER; note = 2'-O-methyl-cytidine-3'-phosphate
  modified_base 9: mod_base = OTHER; note = 2'-O-methyl-adenosine-3'-phosphate
  modified_base 10: mod_base = OTHER; note = 2'-fluoro-guanosine-3'-phosphate
  modified_base 11: mod_base = OTHER; note = 2'-O-methyl-adenosine-3'-phosphate
  modified_base 12: mod_base = OTHER; note = 2'-O-methyl-guanosine-3'-phosphate
  modified_base 13: mod_base = OTHER; note = 2'-O-methyl-uridine-3'-phosphate
  modified_base 14: mod_base = OTHER; note = 2'-fluoro-cytidine-3'-phosphate
  modified_base 15: mod_base = OTHER; note = 2'-O-methyl-uridine-3'-phosphate
  modified_base 16: mod_base = OTHER; note = 2'-O-methyl-cytidine-3'-phosphate
  modified_base 17: mod_base = OTHER; note = 2'-O-methyl-adenosine-3'-phosphate
  modified_base 18: mod_base = OTHER; note = 2'-O-methyl-guanosine-3'-phosphate
  modified_base 19: mod_base = OTHER; note = 2'-O-methyl-cytidine-3'-thiophosphate-phosphate
  modified_base 20: mod_base = OTHER; note = 2'-O-methyl-cytidine-3'-thiophosphate-phosphate
  modified_base 21: mod_base = OTHER; note = 2'-O-methyl-adenosine-3'-phosphate
aataagccagagtctcagcca

SEQ ID NO: 863 - RNA, 19 nt, synthetic construct
  source 1..19: mol_type = other RNA
  modified_base 1: mod_base = OTHER; note = 2'-O-methyl-guanosine-3'-thiophosphate-phosphate
  modified_base 2: mod_base = OTHER; note = 2'-O-methyl-cytidine-3'-thiophosphate-phosphate
  modified_base 3: mod_base = OTHER; note = 2'-O-methyl-uridine-3'-phosphate
  modified_base 4: mod_base = OTHER; note = 2'-O-methyl-guanosine-3'-phosphate
  modified_base 5: mod_base = OTHER; note = 2'-O-methyl-adenosine-3'-phosphate
  modified_base 6: mod_base = OTHER; note = 2'-O-methyl-guanosine-3'-phosphate
  modified_base 7: mod_base = OTHER; note = 2'-fluoro-adenosine-3'-phosphate
  modified_base 8: mod_base = OTHER; note = 2'-fluoro-cytidine-3'-phosphate
  modified_base 9: mod_base = OTHER; note = 2'-fluoro-uridine-3'-phosphate
  modified_base 10: mod_base = OTHER; note = 2'-O-methyl-cytidine-3'-phosphate
  modified_base 11: mod_base = OTHER; note = 2'-O-methyl-uridine-3'-phosphate
  modified_base 12: mod_base = OTHER; note = 2'-O-methyl-guanosine-3'-phosphate
  modified_base 13: mod_base = OTHER; note = 2'-O-methyl-guanosine-3'-phosphate
  modified_base 14: mod_base = OTHER; note = 2'-O-methyl-cytidine-3'-phosphate
  modified_base 15: mod_base = OTHER; note = 2'-O-methyl-uridine-3'-phosphate
  modified_base 16: mod_base = OTHER; note = 2'-O-methyl-uridine-3'-phosphate
  modified_base 17: mod_base = OTHER; note = 2'-O-methyl-adenosine-3'-phosphate
  modified_base 18: mod_base = OTHER; note = 2'-O-methyl-uridine-3'-phosphate
  modified_base 19: mod_base = OTHER; note = 2'-O-methyl-uridine-3'-phosphate
gctgagactctggcttatt

SEQ ID NO: 864 - RNA, 21 nt, synthetic construct
  source 1..21: mol_type = other RNA
  modified_base 1: mod_base = OTHER; note = 2'-O-methyl-adenosine-3'-thiophosphate-phosphate
  modified_base 2: mod_base = OTHER; note = 2'-fluoro-adenosine-3'-thiophosphate-phosphate
  modified_base 3: mod_base = OTHER; note = 2'-O-methyl-uridine-3'-phosphate
  modified_base 4: mod_base = OTHER; note = 2'-O-methyl-adenosine-3'-phosphate
  modified_base 5: mod_base = OTHER; note = 2'-O-methyl-adenosine-3'-phosphate
  modified_base 6: mod_base = OTHER; note = 2'-O-methyl-guanosine-3'-phosphate
  modified_base 7: mod_base = OTHER; note = 2'-O-methyl-cytidine-3'-phosphate
  modified_base 8: mod_base = OTHER; note = 2'-O-methyl-cytidine-3'-phosphate
  modified_base 9: mod_base = OTHER; note = 2'-O-methyl-adenosine-3'-phosphate
  modified_base 10: mod_base = OTHER; note = 2'-O-methyl-guanosine-3'-phosphate
  modified_base 11: mod_base = OTHER; note = 2'-O-methyl-adenosine-3'-phosphate
  modified_base 12: mod_base = OTHER; note = 2'-O-methyl-guanosine-3'-phosphate
  modified_base 13: mod_base = OTHER; note = 2'-O-methyl-uridine-3'-phosphate
  modified_base 14: mod_base = OTHER; note = 2'-fluoro-cytidine-3'-phosphate
  modified_base 15: mod_base = OTHER; note = 2'-O-methyl-uridine-3'-phosphate
  modified_base 16: mod_base = OTHER; note = 2'-O-methyl-cytidine-3'-phosphate
  modified_base 17: mod_base = OTHER; note = 2'-O-methyl-adenosine-3'-phosphate
  modified_base 18: mod_base = OTHER; note = 2'-O-methyl-guanosine-3'-phosphate
  modified_base 19: mod_base = OTHER; note = 2'-O-methyl-guanosine-3'-thiophosphate-phosphate
  modified_base 20: mod_base = OTHER; note = 2'-O-methyl-cytidine-3'-thiophosphate-phosphate
  modified_base 21: mod_base = OTHER; note = 2'-O-methyl-adenosine-3'-phosphate
aataagccagagtctcaggca

SEQ ID NO: 865 - RNA, 19 nt, synthetic construct
  source 1..19: mol_type = other RNA
  modified_base 1: mod_base = OTHER; note = inverted 2'-O-methyl-guanosine-3'-thiophosphate-phosphate
  modified_base 2: mod_base = OTHER; note = 2'-O-methyl-cytidine-3'-thiophosphate-phosphate
  modified_base 3: mod_base = OTHER; note = 2'-O-methyl-uridine-3'-phosphate
  modified_base 4: mod_base = OTHER; note = 2'-O-methyl-guanosine-3'-phosphate
  modified_base 5: mod_base = OTHER; note = 2'-O-methyl-adenosine-3'-phosphate
  modified_base 6: mod_base = OTHER; note = 2'-O-methyl-guanosine-3'-phosphate
  modified_base 7: mod_base = OTHER; note = 2'-fluoro-adenosine-3'-phosphate
  modified_base 8: mod_base = OTHER; note = 2'-fluoro-cytidine-3'-phosphate
  modified_base 9: mod_base = OTHER; note = 2'-fluoro-uridine-3'-phosphate
  modified_base 10: mod_base = OTHER; note = 2'-O-methyl-cytidine-3'-phosphate
  modified_base 11: mod_base = OTHER; note = 2'-O-methyl-uridine-3'-phosphate
  modified_base 12: mod_base = OTHER; note = 2'-O-methyl-guanosine-3'-phosphate
  modified_base 13: mod_base = OTHER; note = 2'-O-methyl-guanosine-3'-phosphate
  modified_base 14: mod_base = OTHER; note = 2'-O-methyl-cytidine-3'-phosphate
  modified_base 15: mod_base = OTHER; note = 2'-O-methyl-uridine-3'-phosphate
  modified_base 16: mod_base = OTHER; note = 2'-O-methyl-uridine-3'-phosphate
  modified_base 17: mod_base = OTHER; note = 2'-O-methyl-adenosine-3'-phosphate
  modified_base 18: mod_base = OTHER; note = 2'-O-methyl-uridine-3'-phosphate
  modified_base 19: mod_base = OTHER; note = 2'-O-methyl-uridine-3'-phosphate
gctgagactctggcttatt

SEQ ID NO: 866 - RNA, 21 nt, synthetic construct
  source 1..21: mol_type = other RNA
  modified_base 1: mod_base = OTHER; note = 2'-O-methyl-adenosine-3'-thiophosphate-phosphate
  modified_base 2: mod_base = OTHER; note = 2'-fluoro-adenosine-3'-thiophosphate-phosphate
  modified_base 3: mod_base = OTHER; note = 2'-O-methyl-uridine-3'-phosphate
  modified_base 4: mod_base = OTHER; note = 2'-O-methyl-adenosine-3'-phosphate
  modified_base 5: mod_base = OTHER; note = 2'-O-methyl-adenosine-3'-phosphate
  modified_base 6: mod_base = OTHER; note = 2'-O-methyl-guanosine-3'-phosphate
  modified_base 7: mod_base = OTHER; note = 2'-O-methyl-cytidine-3'-phosphate
  modified_base 8: mod_base = OTHER; note = 2'-O-methyl-cytidine-3'-phosphate
  modified_base 9: mod_base = OTHER; note = 2'-O-methyl-adenosine-3'-phosphate
  modified_base 10: mod_base = OTHER; note = 2'-O-methyl-guanosine-3'-phosphate
  modified_base 11: mod_base = OTHER; note = 2'-O-methyl-adenosine-3'-phosphate
  modified_base 12: mod_base = OTHER; note = 2'-O-methyl-guanosine-3'-phosphate
  modified_base 13: mod_base = OTHER; note = 2'-O-methyl-uridine-3'-phosphate
  modified_base 14: mod_base = OTHER; note = 2'-fluoro-cytidine-3'-phosphate
  modified_base 15: mod_base = OTHER; note = 2'-O-methyl-uridine-3'-phosphate
  modified_base 16: mod_base = OTHER; note = 2'-O-methyl-cytidine-3'-phosphate
  modified_base 17: mod_base = OTHER; note = 2'-O-methyl-adenosine-3'-phosphate
  modified_base 18: mod_base = OTHER; note = 2'-O-methyl-guanosine-3'-phosphate
  modified_base 19: mod_base = OTHER; note = 2'-O-methyl-cytidine-3'-thiophosphate-phosphate
  modified_base 20: mod_base = OTHER; note = 2'-O-methyl-cytidine-3'-thiophosphate-phosphate
  modified_base 21: mod_base = OTHER; note = 2'-O-methyl-adenosine-3'-phosphate
aataagccagagtctcagcca

SEQ ID NO: 867 - RNA, 19 nt, synthetic construct
  source 1..19: mol_type = other RNA
  modified_base 1: mod_base = OTHER; note = 2'-O-methyl-cytidine-3'-thiophosphate-phosphate
  modified_base 2: mod_base = OTHER; note = 2'-O-methyl-cytidine-3'-thiophosphate-phosphate
  modified_base 3: mod_base = OTHER; note = 2'-O-methyl-adenosine-3'-phosphate
  modified_base 4: mod_base = OTHER; note = 2'-O-methyl-uridine-3'-phosphate
  modified_base 5: mod_base = OTHER; note = 2'-O-methyl-cytidine-3'-phosphate
  modified_base 6: mod_base = OTHER; note = 2'-O-methyl-adenosine-3'-phosphate
  modified_base 7: mod_base = OTHER; note = 2'-fluoro-guanosine-3'-phosphate
  modified_base 8: mod_base = OTHER; note = 2'-fluoro-cytidine-3'-phosphate
  modified_base 9: mod_base = OTHER; note = 2'-fluoro-uridine-3'-phosphate
  modified_base 10: mod_base = OTHER; note = 2'-O-methyl-uridine-3'-phosphate
  modified_base 11: mod_base = OTHER; note = 2'-O-methyl-uridine-3'-phosphate
  modified_base 12: mod_base = OTHER; note = 2'-O-methyl-guanosine-3'-phosphate
  modified_base 13: mod_base = OTHER; note = 2'-O-methyl-cytidine-3'-phosphate
  modified_base 14: mod_base = OTHER; note = 2'-O-methyl-uridine-3'-phosphate
  modified_base 15: mod_base = OTHER; note = 2'-O-methyl-adenosine-3'-phosphate
  modified_base 16: mod_base = OTHER; note = 2'-O-methyl-cytidine-3'-phosphate
  modified_base 17: mod_base = OTHER; note = 2'-O-methyl-uridine-3'-phosphate
  modified_base 18: mod_base = OTHER; note = 2'-O-methyl-guanosine-3'-phosphate
  modified_base 19: mod_base = OTHER; note = 2'-O-methyl-uridine-3'-phosphate
ccatcagctttgctactgt

SEQ ID NO: 868 - RNA, 21 nt, synthetic construct
  source 1..21: mol_type = other RNA
  modified_base 1: mod_base = OTHER; note = 2'-O-methyl-adenosine-3'-thiophosphate-phosphate
  modified_base 2: mod_base = OTHER; note = 2'-fluoro-cytidine-3'-thiophosphate-phosphate
  modified_base 3: mod_base = OTHER; note = 2'-O-methyl-adenosine-3'-phosphate
  modified_base 4: mod_base = OTHER; note = 2'-O-methyl-guanosine-3'-phosphate
  modified_base 5: mod_base = OTHER; note = 2'-O-methyl-uridine-3'-phosphate
  modified_base 6: mod_base = OTHER; note = 2'-O-methyl-adenosine-3'-phosphate
  modified_base 7: mod_base = OTHER; note = 2'-O-methyl-guanosine-3'-phosphate
  modified_base 8: mod_base = OTHER; note = 2'-O-methyl-cytidine-3'-phosphate
  modified_base 9: mod_base = OTHER; note = 2'-fluoro-adenosine-3'-phosphate
  modified_base 10: mod_base = OTHER; note = 2'-O-methyl-adenosine-3'-phosphate
  modified_base 11: mod_base = OTHER; note = 2'-O-methyl-adenosine-3'-phosphate
  modified_base 12: mod_base = OTHER; note = 2'-fluoro-guanosine-3'-phosphate
  modified_base 13: mod_base = OTHER; note = 2'-O-methyl-cytidine-3'-phosphate
  modified_base 14: mod_base = OTHER; note = 2'-fluoro-uridine-3'-phosphate
  modified_base 15: mod_base = OTHER; note = 2'-O-methyl-guanosine-3'-phosphate
  modified_base 16: mod_base = OTHER; note = 2'-O-methyl-adenosine-3'-phosphate
  modified_base 17: mod_base = OTHER; note = 2'-O-methyl-uridine-3'-phosphate
  modified_base 18: mod_base = OTHER; note = 2'-O-methyl-guanosine-3'-phosphate
  modified_base 19: mod_base = OTHER; note = 2'-O-methyl-guanosine-3'-thiophosphate-phosphate
  modified_base 20: mod_base = OTHER; note = 2'-O-methyl-uridine-3'-thiophosphate-phosphate
  modified_base 21: mod_base = OTHER; note = 2'-O-methyl-uridine-3'-phosphate
acagtagcaaagctgatggtt

SEQ ID NO: 869 - RNA, 19 nt, synthetic construct
  source 1..19: mol_type = other RNA
  modified_base 1: mod_base = OTHER; note = 2'-O-methyl-cytidine-3'-thiophosphate-phosphate
  modified_base 2: mod_base = OTHER; note = 2'-O-methyl-cytidine-3'-thiophosphate-phosphate
  modified_base 3: mod_base = OTHER; note = 2'-O-methyl-adenosine-3'-phosphate
  modified_base 4: mod_base = OTHER; note = 2'-O-methyl-uridine-3'-phosphate
  modified_base 5: mod_base = OTHER; note = 2'-O-methyl-cytidine-3'-phosphate
  modified_base 6: mod_base = OTHER; note = 2'-O-methyl-adenosine-3'-phosphate
  modified_base 7: mod_base = OTHER; note = 2'-fluoro-guanosine-3'-phosphate
  modified_base 8: mod_base = OTHER; note = 2'-fluoro-cytidine-3'-phosphate
  modified_base 9: mod_base = OTHER; note = 2'-fluoro-uridine-3'-phosphate
  modified_base 10: mod_base = OTHER; note = 2'-O-methyl-uridine-3'-phosphate
  modified_base 11: mod_base = OTHER; note = 2'-O-methyl-uridine-3'-phosphate
  modified_base 12: mod_base = OTHER; note = 2'-O-methyl-guanosine-3'-phosphate
  modified_base 13: mod_base = OTHER; note = 2'-O-methyl-cytidine-3'-phosphate
  modified_base 14: mod_base = OTHER; note = 2'-O-methyl-uridine-3'-phosphate
  modified_base 15: mod_base = OTHER; note = 2'-O-methyl-adenosine-3'-phosphate
  modified_base 16: mod_base = OTHER; note = 2'-O-methyl-cytidine-3'-phosphate
  modified_base 17: mod_base = OTHER; note = 2'-O-methyl-uridine-3'-phosphate
  modified_base 18: mod_base = OTHER; note = 2'-O-methyl-guanosine-3'-phosphate
  modified_base 19: mod_base = OTHER; note = 2'-O-methyl-uridine-3'-phosphate
ccatcagctttgctactgt

SEQ ID NO: 870 - RNA, 21 nt, synthetic construct
  source 1..21: mol_type = other RNA
  modified_base 1: mod_base = OTHER; note = 2'-O-methyl-adenosine-3'-thiophosphate-phosphate
  modified_base 2: mod_base = OTHER; note = 2'-fluoro-cytidine-3'-thiophosphate-phosphate
  modified_base 3: mod_base = OTHER; note = 2'-O-methyl-adenosine-3'-phosphate
  modified_base 4: mod_base = OTHER; note = 2'-O-methyl-guanosine-3'-phosphate
  modified_base 5: mod_base = OTHER; note = 2'-O-methyl-uridine-3'-phosphate
  modified_base 6: mod_base = OTHER; note = 2'-O-methyl-adenosine-3'-phosphate
  modified_base 7: mod_base = OTHER; note = 2'-O-methyl-guanosine-3'-phosphate
  modified_base 8: mod_base = OTHER; note = 2'-O-methyl-cytidine-3'-phosphate
  modified_base 9: mod_base = OTHER; note = 2'-fluoro-adenosine-3'-phosphate
  modified_base 10: mod_base = OTHER; note = 2'-O-methyl-adenosine-3'-phosphate
  modified_base 11: mod_base = OTHER; note = 2'-O-methyl-adenosine-3'-phosphate
  modified_base 12: mod_base = OTHER; note = 2'-fluoro-guanosine-3'-phosphate
  modified_base 13: mod_base = OTHER; note = 2'-O-methyl-cytidine-3'-phosphate
  modified_base 14: mod_base = OTHER; note = 2'-O-methyl-uridine-3'-phosphate
  modified_base 15: mod_base = OTHER; note = 2'-O-methyl-guanosine-3'-phosphate
  modified_base 16: mod_base = OTHER; note = 2'-O-methyl-adenosine-3'-phosphate
  modified_base 17: mod_base = OTHER; note = 2'-O-methyl-uridine-3'-phosphate
  modified_base 18: mod_base = OTHER; note = 2'-O-methyl-guanosine-3'-phosphate
  modified_base 19: mod_base = OTHER; note = 2'-O-methyl-guanosine-3'-thiophosphate-phosphate
  modified_base 20: mod_base = OTHER; note = 2'-O-methyl-uridine-3'-thiophosphate-phosphate
  modified_base 21: mod_base = OTHER; note = 2'-O-methyl-uridine-3'-phosphate
acagtagcaaagctgatggtt

SEQ ID NO: 871 - RNA, 19 nt, synthetic construct
  source 1..19: mol_type = other RNA
  modified_base 1: mod_base = OTHER; note = 2'-O-methyl-cytidine-3'-thiophosphate-phosphate
  modified_base 2: mod_base = OTHER; note = 2'-O-methyl-cytidine-3'-thiophosphate-phosphate
  modified_base 3: mod_base = OTHER; note = 2'-O-methyl-adenosine-3'-phosphate
  modified_base 4: mod_base = OTHER; note = 2'-O-methyl-uridine-3'-phosphate
  modified_base 5: mod_base = OTHER; note = 2'-O-methyl-cytidine-3'-phosphate
  modified_base 6: mod_base = OTHER; note = 2'-O-methyl-adenosine-3'-phosphate
  modified_base 7: mod_base = OTHER; note = 2'-fluoro-guanosine-3'-phosphate
  modified_base 8: mod_base = OTHER; note = 2'-fluoro-cytidine-3'-phosphate
  modified_base 9: mod_base = OTHER; note = 2'-fluoro-uridine-3'-phosphate
  modified_base 10: mod_base = OTHER; note = 2'-O-methyl-uridine-3'-phosphate
  modified_base 11: mod_base = OTHER; note = 2'-O-methyl-uridine-3'-phosphate
  modified_base 12: mod_base = OTHER; note = 2'-O-methyl-guanosine-3'-phosphate
  modified_base 13: mod_base = OTHER; note = 2'-O-methyl-cytidine-3'-phosphate
  modified_base 14: mod_base = OTHER; note = 2'-O-methyl-uridine-3'-phosphate
  modified_base 15: mod_base = OTHER; note = 2'-O-methyl-adenosine-3'-phosphate
  modified_base 16: mod_base = OTHER; note = 2'-O-methyl-cytidine-3'-phosphate
  modified_base 17: mod_base = OTHER; note = 2'-O-methyl-uridine-3'-phosphate
  modified_base 18: mod_base = OTHER; note = 2'-O-methyl-guanosine-3'-phosphate
  modified_base 19: mod_base = OTHER; note = 2'-O-methyl-uridine-3'-phosphate
ccatcagctttgctactgt

SEQ ID NO: 872 - RNA, 21 nt, synthetic construct
  source 1..21: mol_type = other RNA
  modified_base 1: mod_base = OTHER; note = 2'-O-methyl-adenosine-3'-thiophosphate-phosphate
  modified_base 2: mod_base = OTHER; note = 2'-fluoro-cytidine-3'-thiophosphate-phosphate
  modified_base 3: mod_base = OTHER; note = 2'-O-methyl-adenosine-3'-phosphate
  modified_base 4: mod_base = OTHER; note = 2'-O-methyl-guanosine-3'-phosphate
  modified_base 5: mod_base = OTHER; note = 2'-O-methyl-uridine-3'-phosphate
  modified_base 6: mod_base = OTHER; note = 2'-O-methyl-adenosine-3'-phosphate
  modified_base 7: mod_base = OTHER; note = 2'-O-methyl-guanosine-3'-phosphate
  modified_base 8: mod_base = OTHER; note = 2'-fluoro-cytidine-3'-phosphate
  modified_base 9: mod_base = OTHER; note = 2'-fluoro-adenosine-3'-phosphate
  modified_base 10: mod_base = OTHER; note = 2'-O-methyl-adenosine-3'-phosphate
  modified_base 11: mod_base = OTHER; note = 2'-O-methyl-adenosine-3'-phosphate
  modified_base 12: mod_base = OTHER; note = 2'-fluoro-guanosine-3'-phosphate
  modified_base 13: mod_base = OTHER; note = 2'-O-methyl-cytidine-3'-phosphate
  modified_base 14: mod_base = OTHER; note = 2'-fluoro-uridine-3'-phosphate
  modified_base 15: mod_base = OTHER; note = 2'-O-methyl-guanosine-3'-phosphate
  modified_base 16: mod_base = OTHER; note = 2'-O-methyl-adenosine-3'-phosphate
  modified_base 17: mod_base = OTHER; note = 2'-O-methyl-uridine-3'-phosphate
  modified_base 18: mod_base = OTHER; note = 2'-O-methyl-guanosine-3'-phosphate
  modified_base 19: mod_base = OTHER; note = 2'-O-methyl-guanosine-3'-thiophosphate-phosphate
  modified_base 20: mod_base = OTHER; note = 2'-O-methyl-uridine-3'-thiophosphate-phosphate
  modified_base 21: mod_base = OTHER; note = 2'-O-methyl-uridine-3'-phosphate
acagtagcaaagctgatggtt

SEQ ID NO: 873 - RNA, 19 nt, synthetic construct
  source 1..19: mol_type = other RNA
  modified_base 1: mod_base = OTHER; note = 2'-O-methyl-cytidine-3'-thiophosphate-phosphate
  modified_base 2: mod_base = OTHER; note = 2'-O-methyl-cytidine-3'-thiophosphate-phosphate
  modified_base 3: mod_base = OTHER; note = 2'-O-methyl-adenosine-3'-phosphate
  modified_base 4: mod_base = OTHER; note = 2'-O-methyl-uridine-3'-phosphate
  modified_base 5: mod_base = OTHER; note = 2'-O-methyl-cytidine-3'-phosphate
  modified_base 6: mod_base = OTHER; note = 2'-O-methyl-adenosine-3'-phosphate
  modified_base 7: mod_base = OTHER; note = 2'-fluoro-guanosine-3'-phosphate
  modified_base 8: mod_base = OTHER; note = 2'-fluoro-cytidine-3'-phosphate
  modified_base 9: mod_base = OTHER; note = 2'-fluoro-uridine-3'-phosphate
  modified_base 10: mod_base = OTHER; note = 2'-O-methyl-uridine-3'-phosphate
  modified_base 11: mod_base = OTHER; note = 2'-O-methyl-uridine-3'-phosphate
  modified_base 12: mod_base = OTHER; note = 2'-O-methyl-guanosine-3'-phosphate
  modified_base 13: mod_base = OTHER; note = 2'-O-methyl-cytidine-3'-phosphate
  modified_base 14: mod_base = OTHER; note = 2'-O-methyl-uridine-3'-phosphate
  modified_base 15: mod_base = OTHER; note = 2'-O-methyl-adenosine-3'-phosphate
  modified_base 16: mod_base = OTHER; note = 2'-O-methyl-cytidine-3'-phosphate
  modified_base 17: mod_base = OTHER; note = 2'-O-methyl-uridine-3'-phosphate
  modified_base 18: mod_base = OTHER; note = 2'-O-methyl-guanosine-3'-phosphate
  modified_base 19: mod_base = OTHER; note = 2'-O-methyl-uridine-3'-phosphate
ccatcagctttgctactgt

SEQ ID NO: 874 - RNA, 21 nt, synthetic construct
  source 1..21: mol_type = other RNA
  modified_base 1: mod_base = OTHER; note = 2'-O-methyl-adenosine-3'-thiophosphate-phosphate
  modified_base 2: mod_base = OTHER; note = 2'-fluoro-cytidine-3'-thiophosphate-phosphate
  modified_base 3: mod_base = OTHER; note = 2'-O-methyl-adenosine-3'-phosphate
  modified_base 4: mod_base = OTHER; note = 2'-O-methyl-guanosine-3'-phosphate
  modified_base 5: mod_base = OTHER; note = 2'-O-methyl-uridine-3'-phosphate
  modified_base 6: mod_base = OTHER; note = 2'-O-methyl-adenosine-3'-phosphate
  modified_base 7: mod_base = OTHER; note = 2'-O-methyl-guanosine-3'-phosphate
  modified_base 8: mod_base = OTHER; note = 2'-fluoro-cytidine-3'-phosphate
  modified_base 9: mod_base = OTHER; note = 2'-fluoro-adenosine-3'-phosphate
  modified_base 10: mod_base = OTHER; note = 2'-O-methyl-adenosine-3'-phosphate
  modified_base 11: mod_base = OTHER; note = 2'-O-methyl-adenosine-3'-phosphate
  modified_base 12: mod_base = OTHER; note = 2'-fluoro-guanosine-3'-phosphate
  modified_base 13: mod_base = OTHER; note = 2'-O-methyl-cytidine-3'-phosphate
  modified_base 14: mod_base = OTHER; note = 2'-O-methyl-uridine-3'-phosphate
  modified_base 15: mod_base = OTHER; note = 2'-O-methyl-guanosine-3'-phosphate
  modified_base 16: mod_base = OTHER; note = 2'-O-methyl-adenosine-3'-phosphate
  modified_base 17: mod_base = OTHER; note = 2'-O-methyl-uridine-3'-phosphate
  modified_base 18: mod_base = OTHER; note = 2'-O-methyl-guanosine-3'-phosphate
  modified_base 19: mod_base = OTHER; note = 2'-O-methyl-guanosine-3'-thiophosphate-phosphate
  modified_base 20: mod_base = OTHER; note = 2'-O-methyl-uridine-3'-thiophosphate-phosphate
  modified_base 21: mod_base = OTHER; note = 2'-O-methyl-uridine-3'-phosphate
acagtagcaaagctgatggtt

SEQ ID NO: 875 - RNA, 19 nt, synthetic construct
  source 1..19: mol_type = other RNA
  modified_base 1: mod_base = OTHER; note = 2'-O-methyl-cytidine-3'-thiophosphate-phosphate
  modified_base 2: mod_base = OTHER; note = 2'-O-methyl-adenosine-3'-thiophosphate-phosphate
  modified_base 3: mod_base = OTHER; note = 2'-O-methyl-uridine-3'-phosphate
  modified_base 4: mod_base = OTHER; note = 2'-O-methyl-guanosine-3'-phosphate
  modified_base 5: mod_base = OTHER; note = 2'-fluoro-uridine-3'-phosphate
  modified_base 6: mod_base = OTHER; note = 2'-fluoro-guanosine-3'-phosphate
  modified_base 7: mod_base = OTHER; note = 2'-fluoro-adenosine-3'-phosphate
  modified_base 8: mod_base = OTHER; note = 2'-O-methyl-uridine-3'-phosphate
  modified_base 9: mod_base = OTHER; note = 2'-O-methyl-uridine-3'-phosphate
  modified_base 10: mod_base = OTHER; note = 2'-O-methyl-adenosine-3'-phosphate
  modified_base 11: mod_base = OTHER; note = 2'-O-methyl-cytidine-3'-phosphate
  modified_base 12: mod_base = OTHER; note = 2'-O-methyl-adenosine-3'-phosphate
  modified_base 13: mod_base = OTHER; note = 2'-O-methyl-uridine-3'-phosphate
  modified_base 14: mod_base = OTHER; note = 2'-O-methyl-cytidine-3'-phosphate
  modified_base 15: mod_base = OTHER; note = 2'-O-methyl-adenosine-3'-phosphate
  modified_base 16: mod_base = OTHER; note = 2'-O-methyl-uridine-3'-phosphate
  modified_base 17: mod_base = OTHER; note = 2'-O-methyl-cytidine-3'-phosphate
  modified_base 18: mod_base = OTHER; note = 2'-O-methyl-uridine-3'-phosphate
  modified_base 19: mod_base = OTHER; note = 2'-O-methyl-uridine-3'-phosphate
catgtgattacatcatctt

SEQ ID NO: 876 - RNA, 21 nt, synthetic construct
  source 1..21: mol_type = other RNA
  modified_base 1: mod_base = OTHER; note = 2'-O-methyl-adenosine-3'-thiophosphate-phosphate
  modified_base 2: mod_base = OTHER; note = 2'-fluoro-adenosine-3'-thiophosphate-phosphate
  modified_base 3: mod_base = OTHER; note = 2'-O-methyl-guanosine-3'-phosphate
  modified_base 4: mod_base = OTHER; note = 2'-O-methyl-adenosine-3'-phosphate
  modified_base 5: mod_base = OTHER; note = 2'-O-methyl-uridine-3'-phosphate
  modified_base 6: mod_base = OTHER; note = 2'-O-methyl-hypoxanthine-3'-phosphate
  modified_base 7: mod_base = OTHER; note = 2'-O-methyl-adenosine-3'-phosphate
  modified_base 8: mod_base = OTHER; note = 2'-O-methyl-uridine-3'-phosphate
  modified_base 9: mod_base = OTHER; note = 2'-O-methyl-guanosine-3'-phosphate
  modified_base 10: mod_base = OTHER; note = 2'-O-methyl-uridine-3'-phosphate
  modified_base 11: mod_base = OTHER; note = 2'-fluoro-adenosine-3'-phosphate
  modified_base 12: mod_base = OTHER; note = 2'-O-methyl-adenosine-3'-phosphate
  modified_base 13: mod_base = OTHER; note = 2'-O-methyl-uridine-3'-phosphate
  modified_base 14: mod_base = OTHER; note = 2'-O-methyl-cytidine-3'-phosphate
  modified_base 15: mod_base = OTHER; note = 2'-O-methyl-adenosine-3'-phosphate
  modified_base 16: mod_base = OTHER; note = 2'-O-methyl-cytidine-3'-phosphate
  modified_base 17: mod_base = OTHER; note = 2'-O-methyl-adenosine-3'-phosphate
  modified_base 18: mod_base = OTHER; note = 2'-O-methyl-uridine-3'-phosphate
  modified_base 19: mod_base = OTHER; note = 2'-O-methyl-guanosine-3'-thiophosphate-phosphate
  modified_base 20: mod_base = OTHER; note = 2'-O-methyl-uridine-3'-thiophosphate-phosphate
  modified_base 21: mod_base = OTHER; note = 2'-O-methyl-cytidine-3'-phosphate
aagatnatgtaatcacatgtc

SEQ ID NO: 877 - RNA, 19 nt, synthetic construct
  source 1..19: mol_type = other RNA
  modified_base 1: mod_base = OTHER; note = 2'-O-methyl-cytidine-3'-thiophosphate-phosphate
  modified_base 2: mod_base = OTHER; note = 2'-O-methyl-adenosine-3'-thiophosphate-phosphate
  modified_base 3: mod_base = OTHER; note = 2'-O-methyl-uridine-3'-phosphate
  modified_base 4: mod_base = OTHER; note = 2'-O-methyl-guanosine-3'-phosphate
  modified_base 5: mod_base = OTHER; note = 2'-fluoro-uridine-3'-phosphate
  modified_base 6: mod_base = OTHER; note = 2'-fluoro-guanosine-3'-phosphate
  modified_base 7: mod_base = OTHER; note = 2'-fluoro-adenosine-3'-phosphate
  modified_base 8: mod_base = OTHER; note = 2'-O-methyl-uridine-3'-phosphate
  modified_base 9: mod_base = OTHER; note = 2'-O-methyl-uridine-3'-phosphate
  modified_base 10: mod_base = OTHER; note = 2'-O-methyl-adenosine-3'-phosphate
  modified_base 11: mod_base = OTHER; note = 2'-O-methyl-cytidine-3'-phosphate
  modified_base 12: mod_base = OTHER; note = 2'-O-methyl-adenosine-3'-phosphate
  modified_base 13: mod_base = OTHER; note = 2'-O-methyl-uridine-3'-phosphate
  modified_base 14: mod_base = OTHER; note = 2'-O-methyl-cytidine-3'-phosphate
  modified_base 15: mod_base = OTHER; note = 2'-O-methyl-adenosine-3'-phosphate
  modified_base 16: mod_base = OTHER; note = 2'-O-methyl-uridine-3'-phosphate
  modified_base 17: mod_base = OTHER; note = 2'-O-methyl-cytidine-3'-phosphate
  modified_base 18: mod_base = OTHER; note = 2'-O-methyl-uridine-3'-phosphate
  modified_base 19: mod_base = OTHER; note = 2'-O-methyl-uridine-3'-phosphate
catgtgattacatcatctt

SEQ ID NO: 878 - RNA, 21 nt, synthetic construct
  source 1..21: mol_type = other RNA
  modified_base 1: mod_base = OTHER; note = 2'-O-methyl-adenosine-3'-thiophosphate-phosphate
  modified_base 2: mod_base = OTHER; note = 2'-fluoro-adenosine-3'-thiophosphate-phosphate
  modified_base 3: mod_base = OTHER; note = 2'-O-methyl-guanosine-3'-phosphate
  modified_base 4: mod_base = OTHER; note = 2'-O-methyl-adenosine-3'-phosphate
  modified_base 5: mod_base = OTHER; note = 2'-fluoro-uridine-3'-phosphate
  modified_base 6: mod_base = OTHER; note = 2'-O-methyl-hypoxanthine-3'-phosphate
  modified_base 7: mod_base = OTHER; note = 2'-O-methyl-adenosine-3'-phosphate
  modified_base 8: mod_base = OTHER; note = 2'-O-methyl-uridine-3'-phosphate
  modified_base 9: mod_base = OTHER; note = 2'-O-methyl-guanosine-3'-phosphate
  modified_base 10: mod_base = OTHER; note = 2'-O-methyl-uridine-3'-phosphate
  modified_base 11: mod_base = OTHER; note = 2'-fluoro-adenosine-3'-phosphate
  modified_base 12: mod_base = OTHER; note = 2'-O-methyl-adenosine-3'-phosphate
  modified_base 13: mod_base = OTHER; note = 2'-O-methyl-uridine-3'-phosphate
  modified_base 14: mod_base = OTHER; note = 2'-O-methyl-cytidine-3'-phosphate
  modified_base 15: mod_base = OTHER; note = 2'-O-methyl-adenosine-3'-phosphate
  modified_base 16: mod_base = OTHER; note = 2'-O-methyl-cytidine-3'-phosphate
  modified_base 17: mod_base = OTHER; note = 2'-O-methyl-adenosine-3'-phosphate
  modified_base 18: mod_base = OTHER; note = 2'-O-methyl-uridine-3'-phosphate
  modified_base 19: mod_base = OTHER; note = 2'-O-methyl-guanosine-3'-thiophosphate-phosphate
  modified_base 20: mod_base = OTHER; note = 2'-O-methyl-uridine-3'-thiophosphate-phosphate
  modified_base 21: mod_base = OTHER; note = 2'-O-methyl-cytidine-3'-phosphate
aagatnatgtaatcacatgtc

SEQ ID NO: 879 - RNA, 19 nt, synthetic construct
  source 1..19: mol_type = other RNA
  modified_base 1: mod_base = OTHER; note = 2'-O-methyl-cytidine-3'-thiophosphate-phosphate
  modified_base 2: mod_base = OTHER; note = 2'-O-methyl-adenosine-3'-thiophosphate-phosphate
  modified_base 3: mod_base = OTHER; note = 2'-O-methyl-uridine-3'-phosphate
  modified_base 4: mod_base = OTHER; note = 2'-O-methyl-guanosine-3'-phosphate
  modified_base 5: mod_base = OTHER; note = 2'-fluoro-uridine-3'-phosphate
  modified_base 6: mod_base = OTHER; note = 2'-fluoro-guanosine-3'-phosphate
  modified_base 7: mod_base = OTHER; note = 2'-fluoro-adenosine-3'-phosphate
  modified_base 8: mod_base = OTHER; note = 2'-O-methyl-uridine-3'-phosphate
  modified_base 9: mod_base = OTHER; note = 2'-O-methyl-uridine-3'-phosphate
  modified_base 10: mod_base = OTHER; note = 2'-O-methyl-adenosine-3'-phosphate
  modified_base 11: mod_base = OTHER; note = 2'-O-methyl-cytidine-3'-phosphate
  modified_base 12: mod_base = OTHER; note = 2'-O-methyl-adenosine-3'-phosphate
  modified_base 13: mod_base = OTHER; note = 2'-O-methyl-uridine-3'-phosphate
  modified_base 14: mod_base = OTHER; note = 2'-O-methyl-cytidine-3'-phosphate
  modified_base 15: mod_base = OTHER; note = 2'-O-methyl-adenosine-3'-phosphate
  modified_base 16: mod_base = OTHER; note = 2'-O-methyl-uridine-3'-phosphate
  modified_base 17: mod_base = OTHER; note = 2'-O-methyl-cytidine-3'-phosphate
  modified_base 18: mod_base = OTHER; note = 2'-O-methyl-uridine-3'-phosphate
  modified_base 19: mod_base = OTHER; note = 2'-O-methyl-uridine-3'-phosphate
catgtgattacatcatctt

SEQ ID NO: 880 - RNA, 21 nt, synthetic construct
  source 1..21: mol_type = other RNA
  modified_base 1: mod_base = OTHER; note = 2'-O-methyl-adenosine-3'-thiophosphate-phosphate
  modified_base 2: mod_base = OTHER; note = 2'-fluoro-adenosine-3'-thiophosphate-phosphate
  modified_base 3: mod_base = OTHER; note = 2'-O-methyl-guanosine-3'-phosphate
  modified_base 4: mod_base = OTHER; note = 2'-O-methyl-adenosine-3'-phosphate
  modified_base 5: mod_base = OTHER; note = 2'-fluoro-uridine-3'-phosphate
  modified_base 6: mod_base = OTHER; note = 2'-O-methyl-hypoxanthine-3'-phosphate
  modified_base 7: mod_base = OTHER; note = 2'-fluoro-adenosine-3'-phosphate
  modified_base 8: mod_base = OTHER; note = 2'-O-methyl-uridine-3'-phosphate
  modified_base 9: mod_base = OTHER; note = 2'-O-methyl-guanosine-3'-phosphate
  modified_base 10: mod_base = OTHER; note = 2'-O-methyl-uridine-3'-phosphate
  modified_base 11: mod_base = OTHER; note = 2'-fluoro-adenosine-3'-phosphate
  modified_base 12: mod_base = OTHER; note = 2'-O-methyl-adenosine-3'-phosphate
  modified_base 13: mod_base = OTHER; note = 2'-O-methyl-uridine-3'-phosphate
  modified_base 14: mod_base = OTHER; note = 2'-O-methyl-cytidine-3'-phosphate
  modified_base 15: mod_base = OTHER; note = 2'-O-methyl-adenosine-3'-phosphate
  modified_base 16: mod_base = OTHER; note = 2'-O-methyl-cytidine-3'-phosphate
  modified_base 17: mod_base = OTHER; note = 2'-O-methyl-adenosine-3'-phosphate
  modified_base 18: mod_base = OTHER; note = 2'-O-methyl-uridine-3'-phosphate
  modified_base 19: mod_base = OTHER; note = 2'-O-methyl-guanosine-3'-thiophosphate-phosphate
  modified_base 20: mod_base = OTHER; note = 2'-O-methyl-uridine-3'-thiophosphate-phosphate
  modified_base 21: mod_base = OTHER; note = 2'-O-methyl-cytidine-3'-phosphate
aagatnatgtaatcacatgtc

SEQ ID NO: 881 - RNA, 19 nt, synthetic construct
  source 1..19: mol_type = other RNA
  modified_base 1: mod_base = OTHER; note = 2'-O-methyl-cytidine-3'-thiophosphate-phosphate
  modified_base 2: mod_base = OTHER; note = 2'-O-methyl-adenosine-3'-thiophosphate-phosphate
  modified_base 3: mod_base = OTHER; note = 2'-O-methyl-uridine-3'-phosphate
  modified_base 4: mod_base = OTHER; note = 2'-O-methyl-guanosine-3'-phosphate
  modified_base 5: mod_base = OTHER; note = 2'-fluoro-uridine-3'-phosphate
  modified_base 6: mod_base = OTHER; note = 2'-fluoro-guanosine-3'-phosphate
  modified_base 7: mod_base = OTHER; note = 2'-fluoro-adenosine-3'-phosphate
  modified_base 8: mod_base = OTHER; note = 2'-O-methyl-uridine-3'-phosphate
  modified_base 9: mod_base = OTHER; note = 2'-O-methyl-uridine-3'-phosphate
  modified_base 10: mod_base = OTHER; note = 2'-O-methyl-adenosine-3'-phosphate
  modified_base 11: mod_base = OTHER; note = 2'-O-methyl-cytidine-3'-phosphate
  modified_base 12: mod_base = OTHER; note = 2'-O-methyl-adenosine-3'-phosphate
  modified_base 13: mod_base = OTHER; note = 2'-O-methyl-uridine-3'-phosphate
  modified_base 14: mod_base = OTHER; note = 2'-O-methyl-cytidine-3'-phosphate
  modified_base 15: mod_base = OTHER; note = 2'-O-methyl-adenosine-3'-phosphate
  modified_base 16: mod_base = OTHER; note = 2'-O-methyl-uridine-3'-phosphate
  modified_base 17: mod_base = OTHER; note = 2'-O-methyl-cytidine-3'-phosphate
  modified_base 18: mod_base = OTHER; note = 2'-O-methyl-uridine-3'-phosphate
  modified_base 19: mod_base = OTHER; note = 2'-O-methyl-uridine-3'-phosphate
catgtgattacatcatctt

SEQ ID NO: 882 - RNA, 21 nt, synthetic construct
  source 1..21: mol_type = other RNA
  modified_base 1: mod_base = OTHER; note = 2'-O-methyl-adenosine-3'-thiophosphate-phosphate
  modified_base 2: mod_base = OTHER; note = 2'-deoxy-adenosine-3'-thiophosphate-phosphate
  modified_base 3: mod_base = OTHER; note = 2'-O-methyl-guanosine-3'-phosphate
  modified_base 4: mod_base = OTHER; note = 2'-O-methyl-adenosine-3'-phosphate
  modified_base 5: mod_base = OTHER; note = 2'-deoxy-uridine-3'-phosphate
  modified_base 6: mod_base = OTHER; note = 2'-O-methyl-hypoxanthine-3'-phosphate
  modified_base 7: mod_base = OTHER; note = 2'-deoxy-adenosine-3'-phosphate
  modified_base 8: mod_base = OTHER; note = 2'-O-methyl-uridine-3'-phosphate
  modified_base 9: mod_base = OTHER; note = 2'-O-methyl-guanosine-3'-phosphate
  modified_base 10: mod_base = OTHER; note = 2'-O-methyl-uridine-3'-phosphate
  modified_base 11: mod_base = OTHER; note = 2'-fluoro-adenosine-3'-phosphate
  modified_base 12: mod_base = OTHER; note = 2'-deoxy-adenosine-3'-phosphate
  modified_base 13: mod_base = OTHER; note = 2'-O-methyl-uridine-3'-phosphate
  modified_base 14: mod_base = OTHER; note = 2'-O-methyl-cytidine-3'-phosphate
  modified_base 15: mod_base = OTHER; note = 2'-O-methyl-adenosine-3'-phosphate
  modified_base 16: mod_base = OTHER; note = 2'-O-methyl-cytidine-3'-phosphate
  modified_base 17: mod_base = OTHER; note = 2'-O-methyl-adenosine-3'-phosphate
  modified_base 18: mod_base = OTHER; note = 2'-O-methyl-uridine-3'-phosphate
  modified_base 19: mod_base = OTHER; note = 2'-O-methyl-guanosine-3'-thiophosphate-phosphate
  modified_base 20: mod_base = OTHER; note = 2'-O-methyl-uridine-3'-thiophosphate-phosphate
  modified_base 21: mod_base = OTHER; note = 2'-O-methyl-cytidine-3'-phosphate
aagatnatgtaatcacatgtc

SEQ ID NO: 883 - RNA, 19 nt, synthetic construct
  source 1..19: mol_type = other RNA
  modified_base 1: mod_base = OTHER; note = 2'-O-methyl-cytidine-3'-thiophosphate-phosphate
  modified_base 2: mod_base = OTHER; note = 2'-O-methyl-adenosine-3'-thiophosphate-phosphate
  modified_base 3: mod_base = OTHER; note = 2'-O-methyl-uridine-3'-phosphate
  modified_base 4: mod_base = OTHER; note = 2'-O-methyl-guanosine-3'-phosphate
  modified_base 5: mod_base = OTHER; note = 2'-O-methyl-uridine-3'-phosphate
  modified_base 6: mod_base = OTHER; note = 2'-O-methyl-guanosine-3'-phosphate
  modified_base 7: mod_base = OTHER; note = 2'-O-methyl-adenosine-3'-phosphate
  modified_base 8: mod_base = OTHER; note = 2'-O-methyl-uridine-3'-phosphate
  modified_base 9: mod_base = OTHER; note = 2'-O-methyl-uridine-3'-phosphate
  modified_base 10: mod_base = OTHER; note = 2'-O-methyl-adenosine-3'-phosphate
  modified_base 11: mod_base = OTHER; note = 2'-O-methyl-cytidine-3'-phosphate
  modified_base 12: mod_base = OTHER; note = 2'-O-methyl-adenosine-3'-phosphate
  modified_base 13: mod_base = OTHER; note = 2'-O-methyl-uridine-3'-phosphate
  modified_base 14: mod_base = OTHER; note = 2'-O-methyl-cytidine-3'-phosphate
  modified_base 15: mod_base = OTHER; note = 2'-O-methyl-adenosine-3'-phosphate
  modified_base 16: mod_base = OTHER; note = 2'-O-methyl-uridine-3'-phosphate
  modified_base 17: mod_base = OTHER; note = 2'-O-methyl-cytidine-3'-phosphate
  modified_base 18: mod_base = OTHER; note = 2'-O-methyl-uridine-3'-phosphate
  modified_base 19: mod_base = OTHER; note = 2'-O-methyl-uridine-3'-phosphate
catgtgattacatcatctt

SEQ ID NO: 884 - RNA, 21 nt, synthetic construct
  source 1..21: mol_type = other RNA
  modified_base 1: mod_base = OTHER; note = 2'-O-methyl-adenosine-3'-thiophosphate-phosphate
  modified_base 2: mod_base = OTHER; note = 2'-fluoro-adenosine-3'-thiophosphate-phosphate
  modified_base 3: mod_base = OTHER; note = 2'-O-methyl-guanosine-3'-phosphate
  modified_base 4: mod_base = OTHER; note = 2'-O-methyl-adenosine-3'-phosphate
  modified_base 5: mod_base = OTHER; note = 2'-O-methyl-uridine-3'-phosphate
  modified_base 6: mod_base = OTHER; note = 2'-O-methyl-hypoxanthine-3'-phosphate
  modified_base 7: mod_base = OTHER; note = 2'-O-methyl-adenosine-3'-phosphate
  modified_base 8: mod_base = OTHER; note = 2'-O-methyl-uridine-3'-phosphate
  modified_base 9: mod_base = OTHER; note = 2'-O-methyl-guanosine-3'-phosphate
  modified_base 10: mod_base = OTHER; note = 2'-O-methyl-uridine-3'-phosphate
  modified_base 11: mod_base = OTHER; note = 2'-fluoro-adenosine-3'-phosphate
  modified_base 12: mod_base = OTHER; note = 2'-O-methyl-adenosine-3'-phosphate
  modified_base 13: mod_base = OTHER; note = 2'-O-methyl-uridine-3'-phosphate
  modified_base 14: mod_base = OTHER; note = 2'-O-methyl-cytidine-3'-phosphate
  modified_base 15: mod_base = OTHER; note = 2'-O-methyl-adenosine-3'-phosphate
  modified_base 16: mod_base = OTHER; note = 2'-O-methyl-cytidine-3'-phosphate
  modified_base 17: mod_base = OTHER; note = 2'-O-methyl-adenosine-3'-phosphate
  modified_base 18: mod_base = OTHER; note = 2'-O-methyl-uridine-3'-phosphate
  modified_base 19: mod_base = OTHER; note = 2'-O-methyl-guanosine-3'-thiophosphate-phosphate
  modified_base 20: mod_base = OTHER; note = 2'-O-methyl-uridine-3'-thiophosphate-phosphate
  modified_base 21: mod_base = OTHER; note = 2'-O-methyl-cytidine-3'-phosphate
aagatnatgtaatcacatgtc

SEQ ID NO: 885 - RNA, 19 nt, synthetic construct
  source 1..19: mol_type = other RNA
  modified_base 1: mod_base = OTHER; note = 2'-O-methyl-cytidine-3'-thiophosphate-phosphate
  modified_base 2: mod_base = OTHER; note = 2'-O-methyl-adenosine-3'-thiophosphate-phosphate
  modified_base 3: mod_base = OTHER; note = 2'-O-methyl-uridine-3'-phosphate
  modified_base 4: mod_base = OTHER; note = 2'-O-methyl-guanosine-3'-phosphate
  modified_base 5: mod_base = OTHER; note = 2'-fluoro-uridine-3'-phosphate
  modified_base 6: mod_base = OTHER; note = 2'-fluoro-guanosine-3'-phosphate
  modified_base 7: mod_base = OTHER; note = 2'-fluoro-adenosine-3'-phosphate
  modified_base 8: mod_base = OTHER; note = 2'-O-methyl-uridine-3'-phosphate
  modified_base 9: mod_base = OTHER; note = 2'-O-methyl-uridine-3'-phosphate
  modified_base 10: mod_base = OTHER; note = 2'-O-methyl-adenosine-3'-phosphate
  modified_base 11: mod_base = OTHER; note = 2'-O-methyl-cytidine-3'-phosphate
  modified_base 12: mod_base = OTHER; note = 2'-O-methyl-adenosine-3'-phosphate
  modified_base 13: mod_base = OTHER; note = 2'-O-methyl-uridine-3'-phosphate
  modified_base 14: mod_base = OTHER; note = 2'-O-methyl-cytidine-3'-phosphate
  modified_base 15: mod_base = OTHER; note = 2'-O-methyl-adenosine-3'-phosphate
  modified_base 16: mod_base = OTHER; note = 2'-O-methyl-uridine-3'-phosphate
  modified_base 17: mod_base = OTHER; note = 2'-O-methyl-cytidine-3'-phosphate
  modified_base 18: mod_base = OTHER; note = 2'-O-methyl-uridine-3'-phosphate
  modified_base 19: mod_base = OTHER; note = 2'-O-methyl-uridine-3'-phosphate
catgtgattacatcatctt

SEQ ID NO: 886 - RNA, 21 nt, synthetic construct
  source 1..21: mol_type = other RNA
  modified_base 1: mod_base = OTHER; note = 2'-O-methyl-adenosine-3'-thiophosphate-phosphate
  modified_base 2: mod_base = OTHER; note = 2'-fluoro-adenosine-3'-thiophosphate-phosphate
  modified_base 3: mod_base = OTHER; note = 2'-O-methyl-guanosine-3'-phosphate
  modified_base 4: mod_base = OTHER; note = 2'-O-methyl-adenosine-3'-phosphate
  modified_base 5: mod_base = OTHER; note = 2'-O-methyl-uridine-3'-phosphate
  modified_base 6: mod_base = OTHER; note = 2'-O-methyl-guanosine-3'-phosphate
  modified_base 7: mod_base = OTHER; note = 2'-O-methyl-adenosine-3'-phosphate
  modified_base 8: mod_base = OTHER; note = 2'-O-methyl-uridine-3'-phosphate
  modified_base 9: mod_base = OTHER; note = 2'-O-methyl-guanosine-3'-phosphate
  modified_base 10: mod_base = OTHER; note = 2'-O-methyl-uridine-3'-phosphate
  modified_base 11: mod_base = OTHER; note = 2'-fluoro-adenosine-3'-phosphate
  modified_base 12: mod_base = OTHER; note = 2'-O-methyl-adenosine-3'-phosphate
  modified_base 13: mod_base = OTHER; note = 2'-O-methyl-uridine-3'-phosphate
  modified_base 14: mod_base = OTHER; note = 2'-O-methyl-cytidine-3'-phosphate
  modified_base 15: mod_base = OTHER; note = 2'-O-methyl-adenosine-3'-phosphate
  modified_base 16: mod_base = OTHER; note = 2'-O-methyl-cytidine-3'-phosphate
  modified_base 17: mod_base = OTHER; note = 2'-O-methyl-adenosine-3'-phosphate
  modified_base 18: mod_base = OTHER; note = 2'-O-methyl-uridine-3'-phosphate
  modified_base 19: mod_base = OTHER; note = 2'-O-methyl-guanosine-3'-thiophosphate-phosphate
  modified_base 20: mod_base = OTHER; note = 2'-O-methyl-uridine-3'-thiophosphate-phosphate
  modified_base 21: mod_base = OTHER; note = 2'-O-methyl-cytidine-3'-phosphate
aagatgatgtaatcacatgtc

SEQ ID NO: 887 - RNA, 19 nt, synthetic construct
  source 1..19: mol_type = other RNA
  modified_base 1: mod_base = OTHER; note = 2'-O-methyl-cytidine-3'-thiophosphate-phosphate
  modified_base 2: mod_base = OTHER; note = 2'-O-methyl-adenosine-3'-thiophosphate-phosphate
  modified_base 3: mod_base = OTHER; note = 2'-O-methyl-uridine-3'-phosphate
  modified_base 4: mod_base = OTHER; note = 2'-O-methyl-guanosine-3'-phosphate
  modified_base 5: mod_base = OTHER; note = 2'-fluoro-uridine-3'-phosphate
  modified_base 6: mod_base = OTHER; note = 2'-fluoro-guanosine-3'-phosphate
  modified_base 7: mod_base = OTHER; note = 2'-fluoro-adenosine-3'-phosphate
  modified_base 8: mod_base = OTHER; note = 2'-O-methyl-uridine-3'-phosphate
  modified_base 9: mod_base = OTHER; note = 2'-O-methyl-uridine-3'-phosphate
  modified_base 10: mod_base = OTHER; note = 2'-O-methyl-adenosine-3'-phosphate
  modified_base 11: mod_base = OTHER; note = 2'-O-methyl-cytidine-3'-phosphate
  modified_base 12: mod_base = OTHER; note = 2'-O-methyl-adenosine-3'-phosphate
  modified_base 13: mod_base = OTHER; note = 2'-O-methyl-uridine-3'-phosphate
  modified_base 14: mod_base = OTHER; note = 2'-O-methyl-cytidine-3'-phosphate
  modified_base 15: mod_base = OTHER; note = 2'-O-methyl-adenosine-3'-phosphate
  modified_base 16: mod_base = OTHER; note = 2'-O-methyl-uridine-3'-phosphate
  modified_base 17: mod_base = OTHER; note = 2'-O-methyl-cytidine-3'-phosphate
  modified_base 18: mod_base = OTHER; note = 2'-O-methyl-uridine-3'-phosphate
  modified_base 19: mod_base = OTHER; note = 2'-O-methyl-uridine-3'-phosphate
catgtgattacatcatctt

SEQ ID NO: 888 - RNA, 21 nt, synthetic construct
  source 1..21: mol_type = other RNA
  modified_base 1: mod_base = OTHER; note = 2'-O-methyl-adenosine-3'-thiophosphate-phosphate
  modified_base 2: mod_base = OTHER; note = 2'-fluoro-adenosine-3'-thiophosphate-phosphate
  modified_base 3: mod_base = OTHER; note = 2'-O-methyl-guanosine-3'-phosphate
  modified_base 4: mod_base = OTHER; note = 2'-O-methyl-adenosine-3'-phosphate
  modified_base 5: mod_base = OTHER; note = 2'-fluoro-uridine-3'-phosphate
  modified_base 6: mod_base = OTHER; note = 2'-O-methyl-guanosine-3'-phosphate
  modified_base 7: mod_base = OTHER; note = 2'-O-methyl-adenosine-3'-phosphate
  modified_base 8: mod_base = OTHER; note = 2'-O-methyl-uridine-3'-phosphate
  modified_base 9: mod_base = OTHER; note = 2'-O-methyl-guanosine-3'-phosphate
  modified_base 10: mod_base = OTHER; note = 2'-O-methyl-uridine-3'-phosphate
  modified_base 11: mod_base = OTHER; note = 2'-fluoro-adenosine-3'-phosphate
  modified_base 12: mod_base = OTHER; note = 2'-O-methyl-adenosine-3'-phosphate
  modified_base 13: mod_base = OTHER; note = 2'-O-methyl-uridine-3'-phosphate
  modified_base 14: mod_base = OTHER; note = 2'-O-methyl-cytidine-3'-phosphate
  modified_base 15: mod_base = OTHER; note = 2'-O-methyl-adenosine-3'-phosphate
  modified_base 16: mod_base = OTHER; note = 2'-O-methyl-cytidine-3'-phosphate
  modified_base 17: mod_base = OTHER; note = 2'-O-methyl-adenosine-3'-phosphate
  modified_base 18: mod_base = OTHER; note = 2'-O-methyl-uridine-3'-phosphate
  modified_base 19: mod_base = OTHER; note = 2'-O-methyl-guanosine-3'-thiophosphate-phosphate
  modified_base 20: mod_base = OTHER; note = 2'-O-methyl-uridine-3'-thiophosphate-phosphate
  modified_base 21: mod_base = OTHER; note = 2'-O-methyl-cytidine-3'-phosphate
aagatgatgtaatcacatgtc

SEQ ID NO: 889 - RNA, 19 nt, synthetic construct
  source 1..19: mol_type = other RNA
  modified_base 1: mod_base = OTHER; note = 2'-O-methyl-cytidine-3'-thiophosphate-phosphate
  modified_base 2: mod_base = OTHER; note = 2'-O-methyl-adenosine-3'-thiophosphate-phosphate
  modified_base 3: mod_base = OTHER; note = 2'-O-methyl-uridine-3'-phosphate
  modified_base 4: mod_base = OTHER; note = 2'-O-methyl-guanosine-3'-phosphate
  modified_base 5: mod_base = OTHER; note = 2'-fluoro-uridine-3'-phosphate
  modified_base 6: mod_base = OTHER; note = 2'-fluoro-guanosine-3'-phosphate
  modified_base 7: mod_base = OTHER; note = 2'-fluoro-adenosine-3'-phosphate
  modified_base 8: mod_base = OTHER; note = 2'-O-methyl-uridine-3'-phosphate
  modified_base 9: mod_base = OTHER; note = 2'-O-methyl-uridine-3'-phosphate
  modified_base 10: mod_base = OTHER; note = 2'-O-methyl-adenosine-3'-phosphate
  modified_base 11: mod_base = OTHER; note = 2'-O-methyl-cytidine-3'-phosphate
  modified_base 12: mod_base = OTHER; note = 2'-O-methyl-adenosine-3'-phosphate
  modified_base 13: mod_base = OTHER; note = 2'-O-methyl-uridine-3'-phosphate
  modified_base 14: mod_base = OTHER; note = 2'-O-methyl-cytidine-3'-phosphate
  modified_base 15: mod_base = OTHER; note = 2'-O-methyl-adenosine-3'-phosphate
  modified_base 16: mod_base = OTHER; note = 2'-O-methyl-uridine-3'-phosphate
  modified_base 17: mod_base = OTHER; note = 2'-O-methyl-cytidine-3'-phosphate
  modified_base 18: mod_base = OTHER; note = 2'-O-methyl-uridine-3'-phosphate
  modified_base 19: mod_base = OTHER; note = 2'-O-methyl-uridine-3'-phosphate
catgtgattacatcatctt

SEQ ID NO: 890 - RNA, 21 nt, synthetic construct
  source 1..21: mol_type = other RNA
  modified_base 1: mod_base = OTHER; note = 2'-O-methyl-adenosine-3'-thiophosphate-phosphate
  modified_base 2: mod_base = OTHER; note = 2'-fluoro-adenosine-3'-thiophosphate-phosphate
  modified_base 3: mod_base = OTHER; note = 2'-O-methyl-guanosine-3'-phosphate
  modified_base 4: mod_base = OTHER; note = 2'-O-methyl-adenosine-3'-phosphate
  modified_base 5: mod_base = OTHER; note = 2'-fluoro-uridine-3'-phosphate
  modified_base 6: mod_base = OTHER; note = 2'-O-methyl-guanosine-3'-phosphate
  modified_base 7: mod_base = OTHER; note = 2'-fluoro-adenosine-3'-phosphate
  modified_base 8: mod_base = OTHER; note = 2'-O-methyl-uridine-3'-phosphate
  modified_base 9: mod_base = OTHER; note = 2'-O-methyl-guanosine-3'-phosphate
  modified_base 10: mod_base = OTHER; note = 2'-O-methyl-uridine-3'-phosphate
  modified_base 11: mod_base = OTHER; note = 2'-fluoro-adenosine-3'-phosphate
  modified_base 12: mod_base = OTHER; note = 2'-O-methyl-adenosine-3'-phosphate
  modified_base 13: mod_base = OTHER; note = 2'-O-methyl-uridine-3'-phosphate
  modified_base 14: mod_base = OTHER; note = 2'-O-methyl-cytidine-3'-phosphate
  modified_base 15: mod_base = OTHER; note = 2'-O-methyl-adenosine-3'-phosphate
  modified_base 16: mod_base = OTHER; note = 2'-O-methyl-cytidine-3'-phosphate
  modified_base 17: mod_base = OTHER; note = 2'-O-methyl-adenosine-3'-phosphate
  modified_base 18: mod_base = OTHER; note = 2'-O-methyl-uridine-3'-phosphate
  modified_base 19: mod_base = OTHER; note = 2'-O-methyl-guanosine-3'-thiophosphate-phosphate
  modified_base 20: mod_base = OTHER; note = 2'-O-methyl-uridine-3'-thiophosphate-phosphate
  modified_base 21: mod_base = OTHER; note = 2'-O-methyl-cytidine-3'-phosphate
aagatgatgtaatcacatgtc

SEQ ID NO: 891 - RNA, 19 nt, synthetic construct
  source 1..19: mol_type = other RNA
  modified_base 1: mod_base = OTHER; note = 2'-O-methyl-cytidine-3'-thiophosphate-phosphate
  modified_base 2: mod_base = OTHER; note = 2'-O-methyl-adenosine-3'-thiophosphate-phosphate
  modified_base 3: mod_base = OTHER; note = 2'-O-methyl-uridine-3'-phosphate
  modified_base 4: mod_base = OTHER; note = 2'-O-methyl-guanosine-3'-phosphate
  modified_base 5: mod_base = OTHER; note = 2'-fluoro-uridine-3'-phosphate
  modified_base 6: mod_base = OTHER; note = 2'-fluoro-guanosine-3'-phosphate
  modified_base 7: mod_base = OTHER; note = 2'-fluoro-adenosine-3'-phosphate
  modified_base 8: mod_base = OTHER; note = 2'-O-methyl-uridine-3'-phosphate
  modified_base 9: mod_base = OTHER; note = 2'-O-methyl-uridine-3'-phosphate
  modified_base 10: mod_base = OTHER; note = 2'-O-methyl-adenosine-3'-phosphate
  modified_base 11: mod_base = OTHER; note = 2'-O-methyl-cytidine-3'-phosphate
  modified_base 12: mod_base = OTHER; note = 2'-O-methyl-adenosine-3'-phosphate
  modified_base 13: mod_base = OTHER; note = 2'-O-methyl-uridine-3'-phosphate
  modified_base 14: mod_base = OTHER; note = 2'-O-methyl-cytidine-3'-phosphate
  modified_base 15: mod_base = OTHER; note = 2'-O-methyl-adenosine-3'-phosphate
  modified_base 16: mod_base = OTHER; note = 2'-O-methyl-uridine-3'-phosphate
  modified_base 17: mod_base = OTHER; note = 2'-O-methyl-cytidine-3'-phosphate
  modified_base 18: mod_base = OTHER; note = 2'-O-methyl-uridine-3'-phosphate
  modified_base 19: mod_base = OTHER; note = 2'-O-methyl-uridine-3'-phosphate
catgtgattacatcatctt

SEQ ID NO: 892 - RNA, 21 nt, synthetic construct
  source 1..21: mol_type = other RNA
  modified_base 1: mod_base = OTHER; note = 2'-O-methyl-adenosine-3'-thiophosphate-phosphate
  modified_base 2: mod_base = OTHER; note = 2'-deoxy-adenosine-3'-thiophosphate-phosphate
  modified_base 3: mod_base = OTHER; note = 2'-O-methyl-guanosine-3'-phosphate
  modified_base 4: mod_base = OTHER; note = 2'-O-methyl-adenosine-3'-phosphate
  modified_base 5: mod_base = OTHER; note = 2'-deoxy-uridine-3'-phosphate
  modified_base 6: mod_base = OTHER; note = 2'-O-methyl-guanosine-3'-phosphate
  modified_base 7: mod_base = OTHER; note = 2'-deoxy-adenosine-3'-phosphate
  modified_base 8: mod_base = OTHER; note = 2'-O-methyl-uridine-3'-phosphate
  modified_base 9: mod_base = OTHER; note = 2'-O-methyl-guanosine-3'-phosphate
  modified_base 10: mod_base = OTHER; note = 2'-O-methyl-uridine-3'-phosphate
  modified_base 11: mod_base = OTHER; note = 2'-fluoro-adenosine-3'-phosphate
  modified_base 12: mod_base = OTHER; note = 2'-deoxy-adenosine-3'-phosphate
  modified_base 13: mod_base = OTHER; note = 2'-O-methyl-uridine-3'-phosphate
  modified_base 14: mod_base = OTHER; note = 2'-O-methyl-cytidine-3'-phosphate
  modified_base 15: mod_base = OTHER; note = 2'-O-methyl-adenosine-3'-phosphate
  modified_base 16: mod_base = OTHER; note = 2'-O-methyl-cytidine-3'-phosphate
  modified_base 17: mod_base = OTHER; note = 2'-O-methyl-adenosine-3'-phosphate
  modified_base 18: mod_base = OTHER; note = 2'-O-methyl-uridine-3'-phosphate
  modified_base 19: mod_base = OTHER; note = 2'-O-methyl-guanosine-3'-thiophosphate-phosphate
  modified_base 20: mod_base = OTHER; note = 2'-O-methyl-uridine-3'-thiophosphate-phosphate
  modified_base 21: mod_base = OTHER; note = 2'-O-methyl-cytidine-3'-phosphate
aagatgatgtaatcacatgtc

SEQ ID NO: 893 - RNA, 19 nt, synthetic construct
  source 1..19: mol_type = other RNA
  modified_base 1: mod_base = OTHER; note = 2'-O-methyl-cytidine-3'-thiophosphate-phosphate
  modified_base 2: mod_base = OTHER; note = 2'-O-methyl-adenosine-3'-thiophosphate-phosphate
  modified_base 3: mod_base = OTHER; note = 2'-O-methyl-uridine-3'-phosphate
  modified_base 4: mod_base = OTHER; note = 2'-O-methyl-guanosine-3'-phosphate
  modified_base 5: mod_base = OTHER; note = 2'-O-methyl-uridine-3'-phosphate
  modified_base 6: mod_base = OTHER; note = 2'-O-methyl-guanosine-3'-phosphate
  modified_base 7: mod_base = OTHER; note = 2'-O-methyl-adenosine-3'-phosphate
  modified_base 8: mod_base = OTHER; note = 2'-O-methyl-uridine-3'-phosphate
  modified_base 9: mod_base = OTHER; note = 2'-O-methyl-uridine-3'-phosphate
  modified_base 10: mod_base = OTHER; note = 2'-O-methyl-adenosine-3'-phosphate
  modified_base 11: mod_base = OTHER; note = 2'-O-methyl-cytidine-3'-phosphate
  modified_base 12: mod_base = OTHER; note = 2'-O-methyl-adenosine-3'-phosphate
  modified_base 13: mod_base = OTHER; note = 2'-O-methyl-uridine-3'-phosphate
  modified_base 14: mod_base = OTHER; note = 2'-O-methyl-cytidine-3'-phosphate
  modified_base 15: mod_base = OTHER; note = 2'-O-methyl-adenosine-3'-phosphate
  modified_base 16: mod_base = OTHER; note = 2'-O-methyl-uridine-3'-phosphate
  modified_base 17: mod_base = OTHER; note = 2'-O-methyl-cytidine-3'-phosphate
  modified_base 18: mod_base = OTHER; note = 2'-O-methyl-uridine-3'-phosphate
  modified_base 19: mod_base = OTHER; note = 2'-O-methyl-uridine-3'-phosphate
catgtgattacatcatctt

SEQ ID NO: 894 - RNA, 21 nt, synthetic construct
  source 1..21: mol_type = other RNA
  modified_base 1: mod_base = OTHER; note = 2'-O-methyl-adenosine-3'-thiophosphate-phosphate
  modified_base 2: mod_base = OTHER; note = 2'-fluoro-adenosine-3'-thiophosphate-phosphate
  modified_base 3: mod_base = OTHER; note = 2'-O-methyl-guanosine-3'-phosphate
  modified_base 4: mod_base = OTHER; note = 2'-O-methyl-adenosine-3'-phosphate
  modified_base 5: mod_base = OTHER; note = 2'-O-methyl-uridine-3'-phosphate
  modified_base 6: mod_base = OTHER; note = 2'-O-methyl-guanosine-3'-phosphate
  modified_base 7: mod_base = OTHER; note = 2'-O-methyl-adenosine-3'-phosphate
  modified_base 8: mod_base = OTHER; note = 2'-O-methyl-uridine-3'-phosphate
  modified_base 9: mod_base = OTHER; note = 2'-O-methyl-guanosine-3'-phosphate
  modified_base 10: mod_base = OTHER; note = 2'-O-methyl-uridine-3'-phosphate
  modified_base 11: mod_base = OTHER; note = 2'-fluoro-adenosine-3'-phosphate
  modified_base 12: mod_base = OTHER; note = 2'-O-methyl-adenosine-3'-phosphate
  modified_base 13: mod_base = OTHER; note = 2'-O-methyl-uridine-3'-phosphate
  modified_base 14: mod_base = OTHER; note = 2'-O-methyl-cytidine-3'-phosphate
  modified_base 15: mod_base = OTHER; note = 2'-O-methyl-adenosine-3'-phosphate
  modified_base 16: mod_base = OTHER; note = 2'-O-methyl-cytidine-3'-phosphate
  modified_base 17: mod_base = OTHER; note = 2'-O-methyl-adenosine-3'-phosphate
  modified_base 18: mod_base = OTHER; note = 2'-O-methyl-uridine-3'-phosphate
  modified_base 19: mod_base = OTHER; note = 2'-O-methyl-guanosine-3'-thiophosphate-phosphate
  modified_base 20: mod_base = OTHER; note = 2'-O-methyl-uridine-3'-thiophosphate-phosphate
  modified_base 21: mod_base = OTHER; note = 2'-O-methyl-cytidine-3'-phosphate
aagatgatgtaatcacatgtc

SEQ ID NO: 895 - RNA, 19 nt, synthetic construct
  source 1..19: mol_type = other RNA
catgttatttgccttttga

SEQ ID NO: 896 - RNA, 21 nt, synthetic construct
  source 1..21: mol_type = other RNA
  modified_base 1: mod_base = OTHER; note = 2'-O-methyl-uridine-3'-phosphate
  modified_base 2: mod_base = OTHER; note = 2'-fluoro-cytidine-3'-phosphate
  modified_base 3: mod_base = OTHER; note = 2'-O-methyl-adenosine-3'-phosphate
  modified_base 4: mod_base = OTHER; note = 2'-fluoro-adenosine-3'-phosphate
  modified_base 5: mod_base = OTHER; note = 2'-O-methyl-adenosine-3'-phosphate
  modified_base 6: mod_base = OTHER; note = 2'-fluoro-adenosine-3'-phosphate
  modified_base 7: mod_base = OTHER; note = 2'-O-methyl-guanosine-3'-phosphate
  modified_base 8: mod_base = OTHER; note = 2'-fluoro-guanosine-3'-phosphate
  modified_base 9: mod_base = OTHER; note = 2'-O-methyl-cytidine-3'-phosphate
  modified_base 10: mod_base = OTHER; note = 2'-O-methyl-adenosine-3'-phosphate
  modified_base 11: mod_base = OTHER; note = 2'-O-methyl-adenosine-3'-phosphate
  modified_base 12: mod_base = OTHER; note = 2'-fluoro-adenosine-3'-phosphate
  modified_base 13: mod_base = OTHER; note = 2'-O-methyl-uridine-3'-phosphate
  modified_base 14: mod_base = OTHER; note = 2'-fluoro-adenosine-3'-phosphate
  modified_base 15: mod_base = OTHER; note = 2'-O-methyl-adenosine-3'-phosphate
  modified_base 16: mod_base = OTHER; note = 2'-fluoro-cytidine-3'-phosphate
  modified_base 17: mod_base = OTHER; note = 2'-O-methyl-adenosine-3'-phosphate
  modified_base 18: mod_base = OTHER; note = 2'-fluoro-uridine-3'-phosphate
  modified_base 19: mod_base = OTHER; note = 2'-O-methyl-guanosine-3'-phosphate
  modified_base 20: mod_base = OTHER; note = 2'-O-methyl-uridine-3'-phosphate
  modified_base 21: mod_base = OTHER; note = 2'-O-methyl-uridine-3'-phosphate
tcaaaaggcaaataacatgtt

SEQ ID NO: 897 - RNA, 19 nt, synthetic construct
  source 1..19: mol_type = other RNA
catgttatttgccttttga

SEQ ID NO: 898 - RNA, 21 nt, synthetic construct
  source 1..21: mol_type = other RNA
  modified_base 1: mod_base = OTHER; note = 2'-O-methyl-uridine-3'-phosphate
  modified_base 2: mod_base = OTHER; note = 2'-fluoro-cytidine-3'-phosphate
  modified_base 3: mod_base = OTHER; note = 2'-O-methyl-adenosine-3'-phosphate
  modified_base 4: mod_base = OTHER; note = 2'-fluoro-adenosine-3'-phosphate
  modified_base 5: mod_base = OTHER; note = 2'-O-methyl-adenosine-3'-phosphate
  modified_base 6: mod_base = OTHER; note = 2'-fluoro-adenosine-3'-phosphate
  modified_base 7: mod_base = OTHER; note = 2'-O-methyl-guanosine-3'-phosphate
  modified_base 8: mod_base = OTHER; note = 2'-fluoro-guanosine-3'-phosphate
  modified_base 9: mod_base = OTHER; note = 2'-fluoro-cytidine-3'-phosphate
  modified_base 10: mod_base = OTHER; note = 2'-O-methyl-adenosine-3'-phosphate
  modified_base 11: mod_base = OTHER; note = 2'-O-methyl-adenosine-3'-phosphate
  modified_base 12: mod_base = OTHER; note = 2'-fluoro-adenosine-3'-phosphate
  modified_base 13: mod_base = OTHER; note = 2'-O-methyl-uridine-3'-phosphate
  modified_base 14: mod_base = OTHER; note = 2'-fluoro-adenosine-3'-phosphate
  modified_base 15: mod_base = OTHER; note = 2'-O-methyl-adenosine-3'-phosphate
  modified_base 16: mod_base = OTHER; note = 2'-fluoro-cytidine-3'-phosphate
  modified_base 17: mod_base = OTHER; note = 2'-O-methyl-adenosine-3'-phosphate
  modified_base 18: mod_base = OTHER; note = 2'-fluoro-uridine-3'-phosphate
  modified_base 19: mod_base = OTHER; note = 2'-O-methyl-guanosine-3'-phosphate
  modified_base 20: mod_base = OTHER; note = 2'-O-methyl-uridine-3'-phosphate
  modified_base 21: mod_base = OTHER; note = 2'-O-methyl-uridine-3'-phosphate
tcaaaaggcaaataacatgtt

SEQ ID NO: 899 - RNA, 19 nt, synthetic construct
  source 1..19: mol_type = other RNA
catgttatttgccttttga

SEQ ID NO: 900 - RNA, 21 nt, synthetic construct
  source 1..21: mol_type = other RNA
  modified_base 1: mod_base = OTHER; note = 2'-O-methyl-uridine-3'-phosphate
  modified_base 2: mod_base = OTHER; note = 2'-fluoro-cytidine-3'-phosphate
  modified_base 3: mod_base = OTHER; note = 2'-O-methyl-adenosine-3'-phosphate
  modified_base 4: mod_base = OTHER; note = 2'-fluoro-adenosine-3'-phosphate
  modified_base 5: mod_base = OTHER; note = 2'-O-methyl-adenosine-3'-phosphate
  modified_base 6: mod_base = OTHER; note = 2'-fluoro-adenosine-3'-phosphate
  modified_base 7: mod_base = OTHER; note = 2'-O-methyl-guanosine-3'-phosphate
  modified_base 8: mod_base = OTHER; note = 2'-fluoro-guanosine-3'-phosphate
  modified_base 9: mod_base = OTHER; note = 2'-O-methyl-cytidine-3'-phosphate
  modified_base 10: mod_base = OTHER; note = 2'-fluoro-adenosine-3'-phosphate
  modified_base 11: mod_base = OTHER; note = 2'-O-methyl-adenosine-3'-phosphate
  modified_base 12: mod_base = OTHER; note = 2'-fluoro-adenosine-3'-phosphate
  modified_base 13: mod_base = OTHER; note = 2'-O-methyl-uridine-3'-phosphate
  modified_base 14: mod_base = OTHER; note = 2'-fluoro-adenosine-3'-phosphate
  modified_base 15: mod_base = OTHER; note = 2'-O-methyl-adenosine-3'-phosphate
  modified_base 16: mod_base = OTHER; note = 2'-fluoro-cytidine-3'-phosphate
  modified_base 17: mod_base = OTHER; note = 2'-O-methyl-adenosine-3'-phosphate
  modified_base 18: mod_base = OTHER; note = 2'-fluoro-uridine-3'-phosphate
  modified_base 19: mod_base = OTHER; note = 2'-O-methyl-guanosine-3'-phosphate
  modified_base 20: mod_base = OTHER; note = 2'-O-methyl-uridine-3'-phosphate
  modified_base 21: mod_base = OTHER; note = 2'-O-methyl-uridine-3'-phosphate
tcaaaaggcaaataacatgtt

SEQ ID NO: 901 - RNA, 19 nt, synthetic construct
  source 1..19: mol_type = other RNA
catgttatttgccttttga

SEQ ID NO: 902 - RNA, 21 nt, synthetic construct
  source 1..21: mol_type = other RNA
  modified_base 1: mod_base = OTHER; note = 2'-O-methyl-uridine-3'-phosphate
  modified_base 2: mod_base = OTHER; note = 2'-fluoro-cytidine-3'-phosphate
  modified_base 3: mod_base = OTHER; note = 2'-O-methyl-adenosine-3'-phosphate
  modified_base 4: mod_base = OTHER; note = 2'-fluoro-adenosine-3'-phosphate
  modified_base 5: mod_base = OTHER; note = 2'-O-methyl-adenosine-3'-phosphate
  modified_base 6: mod_base = OTHER; note = 2'-fluoro-adenosine-3'-phosphate
  modified_base 7: mod_base = OTHER; note = 2'-O-methyl-guanosine-3'-phosphate
  modified_base 8: mod_base = OTHER; note = 2'-fluoro-guanosine-3'-phosphate
  modified_base 9: mod_base = OTHER; note = 2'-O-methyl-cytidine-3'-phosphate
  modified_base 10: mod_base = OTHER; note = 2'-O-methyl-adenosine-3'-phosphate
  modified_base 11: mod_base = OTHER; note = 2'-fluoro-adenosine-3'-phosphate
  modified_base 12: mod_base = OTHER; note = 2'-fluoro-adenosine-3'-phosphate
  modified_base 13: mod_base = OTHER; note = 2'-O-methyl-uridine-3'-phosphate
  modified_base 14: mod_base = OTHER; note = 2'-fluoro-adenosine-3'-phosphate
  modified_base 15: mod_base = OTHER; note = 2'-O-methyl-adenosine-3'-phosphate
  modified_base 16: mod_base = OTHER; note = 2'-fluoro-cytidine-3'-phosphate
  modified_base 17: mod_base = OTHER; note = 2'-O-methyl-adenosine-3'-phosphate
  modified_base 18: mod_base = OTHER; note = 2'-fluoro-uridine-3'-phosphate
  modified_base 19: mod_base = OTHER; note = 2'-O-methyl-guanosine-3'-phosphate
  modified_base 20: mod_base = OTHER; note = 2'-O-methyl-uridine-3'-phosphate
  modified_base 21: mod_base = OTHER; note = 2'-O-methyl-uridine-3'-phosphate
tcaaaaggcaaataacatgtt

SEQ ID NO: 903 - RNA, 19 nt, synthetic construct
  source 1..19: mol_type = other RNA
catgttatttgccttttga

SEQ ID NO: 904 - RNA, 21 nt, synthetic construct
  source 1..21: mol_type = other RNA
  modified_base 1: mod_base = OTHER; note = 2'-O-methyl-uridine-3'-phosphate
  modified_base 2: mod_base = OTHER; note = 2'-O-methyl-cytidine-3'-phosphate
  modified_base 3: mod_base = OTHER; note = 2'-O-methyl-adenosine-3'-phosphate
  modified_base 4: mod_base = OTHER; note = 2'-fluoro-adenosine-3'-phosphate
  modified_base 5: mod_base = OTHER; note = 2'-O-methyl-adenosine-3'-phosphate
  modified_base 6: mod_base = OTHER; note = 2'-fluoro-adenosine-3'-phosphate
  modified_base 7: mod_base = OTHER; note = 2'-O-methyl-guanosine-3'-phosphate
  modified_base 8: mod_base = OTHER; note = 2'-fluoro-guanosine-3'-phosphate
  modified_base 9: mod_base = OTHER; note = 2'-O-methyl-cytidine-3'-phosphate
  modified_base 10: mod_base = OTHER; note = 2'-O-methyl-adenosine-3'-phosphate
  modified_base 11: mod_base = OTHER; note = 2'-O-methyl-adenosine-3'-phosphate
  modified_base 12: mod_base = OTHER; note = 2'-fluoro-adenosine-3'-phosphate
  modified_base 13: mod_base = OTHER; note = 2'-O-methyl-uridine-3'-phosphate
  modified_base 14: mod_base = OTHER; note = 2'-fluoro-adenosine-3'-phosphate
  modified_base 15: mod_base = OTHER; note = 2'-O-methyl-adenosine-3'-phosphate
  modified_base 16: mod_base = OTHER; note = 2'-fluoro-cytidine-3'-phosphate
  modified_base 17: mod_base = OTHER; note = 2'-O-methyl-adenosine-3'-phosphate
  modified_base 18: mod_base = OTHER; note = 2'-fluoro-uridine-3'-phosphate
  modified_base 19: mod_base = OTHER; note = 2'-O-methyl-guanosine-3'-phosphate
  modified_base 20: mod_base = OTHER; note = 2'-O-methyl-uridine-3'-phosphate
  modified_base 21: mod_base = OTHER; note = 2'-O-methyl-uridine-3'-phosphate
tcaaaaggcaaataacatgtt

SEQ ID NO: 905 - RNA, 19 nt, synthetic construct
  source 1..19: mol_type = other RNA
catgttatttgccttttga

SEQ ID NO: 906 - RNA, 21 nt, synthetic construct
  source 1..21: mol_type = other RNA
  modified_base 1: mod_base = OTHER; note = 2'-O-methyl-uridine-3'-phosphate
  modified_base 2: mod_base = OTHER; note = 2'-fluoro-cytidine-3'-phosphate
  modified_base 3: mod_base = OTHER; note = 2'-O-methyl-adenosine-3'-phosphate
  modified_base 4: mod_base = OTHER; note = 2'-O-methyl-adenosine-3'-phosphate
  modified_base 5: mod_base = OTHER; note = 2'-O-methyl-adenosine-3'-phosphate
  modified_base 6: mod_base = OTHER; note = 2'-fluoro-adenosine-3'-phosphate
  modified_base 7: mod_base = OTHER; note = 2'-O-methyl-guanosine-3'-phosphate
  modified_base 8: mod_base = OTHER; note = 2'-fluoro-guanosine-3'-phosphate
  modified_base 9: mod_base = OTHER; note = 2'-O-methyl-cytidine-3'-phosphate
  modified_base 10: mod_base = OTHER; note = 2'-O-methyl-adenosine-3'-phosphate
  modified_base 11: mod_base = OTHER; note = 2'-O-methyl-adenosine-3'-phosphate
  modified_base 12: mod_base = OTHER; note = 2'-fluoro-adenosine-3'-phosphate
  modified_base 13: mod_base = OTHER; note = 2'-O-methyl-uridine-3'-phosphate
  modified_base 14: mod_base = OTHER; note = 2'-fluoro-adenosine-3'-phosphate
  modified_base 15: mod_base = OTHER; note = 2'-O-methyl-adenosine-3'-phosphate
  modified_base 16: mod_base = OTHER; note = 2'-fluoro-cytidine-3'-phosphate
  modified_base 17: mod_base = OTHER; note = 2'-O-methyl-adenosine-3'-phosphate
  modified_base 18: mod_base = OTHER; note = 2'-fluoro-uridine-3'-phosphate
  modified_base 19: mod_base = OTHER; note = 2'-O-methyl-guanosine-3'-phosphate
  modified_base 20: mod_base = OTHER; note = 2'-O-methyl-uridine-3'-phosphate
  modified_base 21: mod_base = OTHER; note = 2'-O-methyl-uridine-3'-phosphate
tcaaaaggcaaataacatgtt

SEQ ID NO: 907 - RNA, 19 nt, synthetic construct
  source 1..19: mol_type = other RNA
catgttatttgccttttga

SEQ ID NO: 908 - RNA, 21 nt, synthetic construct
  source 1..21: mol_type = other RNA
  modified_base 1: mod_base = OTHER; note = 2'-O-methyl-uridine-3'-phosphate
  modified_base 2: mod_base = OTHER; note = 2'-fluoro-cytidine-3'-phosphate
  modified_base 3: mod_base = OTHER; note = 2'-O-methyl-adenosine-3'-phosphate
  modified_base 4: mod_base = OTHER; note = 2'-fluoro-adenosine-3'-phosphate
  modified_base 5: mod_base = OTHER; note = 2'-O-methyl-adenosine-3'-phosphate
  modified_base 6: mod_base = OTHER; note = 2'-O-methyl-adenosine-3'-phosphate
  modified_base 7: mod_base = OTHER; note = 2'-O-methyl-guanosine-3'-phosphate
  modified_base 8: mod_base = OTHER; note = 2'-fluoro-guanosine-3'-phosphate
  modified_base 9: mod_base = OTHER; note = 2'-O-methyl-cytidine-3'-phosphate
  modified_base 10: mod_base = OTHER; note = 2'-O-methyl-adenosine-3'-phosphate
  modified_base 11: mod_base = OTHER; note = 2'-O-methyl-adenosine-3'-phosphate
  modified_base 12: mod_base = OTHER; note = 2'-fluoro-adenosine-3'-phosphate
  modified_base 13: mod_base = OTHER; note = 2'-O-methyl-uridine-3'-phosphate
  modified_base 14: mod_base = OTHER; note = 2'-fluoro-adenosine-3'-phosphate
  modified_base 15: mod_base = OTHER; note = 2'-O-methyl-adenosine-3'-phosphate
  modified_base 16: mod_base = OTHER; note = 2'-fluoro-cytidine-3'-phosphate
  modified_base 17: mod_base = OTHER; note = 2'-O-methyl-adenosine-3'-phosphate
  modified_base 18: mod_base = OTHER; note = 2'-fluoro-uridine-3'-phosphate
  modified_base 19: mod_base = OTHER; note = 2'-O-methyl-guanosine-3'-phosphate
  modified_base 20: mod_base = OTHER; note = 2'-O-methyl-uridine-3'-phosphate
  modified_base 21: mod_base = OTHER; note = 2'-O-methyl-uridine-3'-phosphate
tcaaaaggcaaataacatgtt

SEQ ID NO: 909 - RNA, 19 nt, synthetic construct
  source 1..19: mol_type = other RNA
catgttatttgccttttga

SEQ ID NO: 910 - RNA, 21 nt, synthetic construct
  source 1..21: mol_type = other RNA
  modified_base 1: mod_base = OTHER; note = 2'-O-methyl-uridine-3'-phosphate
  modified_base 2: mod_base = OTHER; note = 2'-fluoro-cytidine-3'-phosphate
  modified_base 3: mod_base = OTHER; note = 2'-O-methyl-adenosine-3'-phosphate
  modified_base 4: mod_base = OTHER; note = 2'-fluoro-adenosine-3'-phosphate
  modified_base 5: mod_base = OTHER; note = 2'-O-methyl-adenosine-3'-phosphate
  modified_base 6: mod_base = OTHER; note = 2'-fluoro-adenosine-3'-phosphate
  modified_base 7: mod_base = OTHER; note = 2'-O-methyl-guanosine-3'-phosphate
  modified_base 8: mod_base = OTHER; note = 2'-O-methyl-guanosine-3'-phosphate
  modified_base 9: mod_base = OTHER; note = 2'-O-methyl-cytidine-3'-phosphate
  modified_base 10: mod_base = OTHER; note = 2'-O-methyl-adenosine-3'-phosphate
  modified_base 11: mod_base = OTHER; note = 2'-O-methyl-adenosine-3'-phosphate
  modified_base 12: mod_base = OTHER; note = 2'-fluoro-adenosine-3'-phosphate
  modified_base 13: mod_base = OTHER; note = 2'-O-methyl-uridine-3'-phosphate
  modified_base 14: mod_base = OTHER; note = 2'-fluoro-adenosine-3'-phosphate
  modified_base 15: mod_base = OTHER; note = 2'-O-methyl-adenosine-3'-phosphate
  modified_base 16: mod_base = OTHER; note = 2'-fluoro-cytidine-3'-phosphate
  modified_base 17: mod_base = OTHER; note = 2'-O-methyl-adenosine-3'-phosphate
  modified_base 18: mod_base = OTHER; note = 2'-fluoro-uridine-3'-phosphate
  modified_base 19: mod_base = OTHER; note = 2'-O-methyl-guanosine-3'-phosphate
  modified_base 20: mod_base = OTHER; note = 2'-O-methyl-uridine-3'-phosphate
  modified_base 21: mod_base = OTHER; note = 2'-O-methyl-uridine-3'-phosphate
tcaaaaggcaaataacatgtt

SEQ ID NO: 911 - RNA, 19 nt, synthetic construct
  source 1..19: mol_type = other RNA
catgttatttgccttttga

SEQ ID NO: 912 - RNA, 21 nt, synthetic construct
  source 1..21: mol_type = other RNA
  modified_base 1: mod_base = OTHER; note = 2'-O-methyl-uridine-3'-phosphate
  modified_base 2: mod_base = OTHER; note = 2'-fluoro-cytidine-3'-phosphate
  modified_base 3: mod_base = OTHER; note = 2'-O-methyl-adenosine-3'-phosphate
  modified_base 4: mod_base = OTHER; note = 2'-fluoro-adenosine-3'-phosphate
  modified_base 5: mod_base = OTHER; note = 2'-O-methyl-adenosine-3'-phosphate
  modified_base 6: mod_base = OTHER; note = 2'-fluoro-adenosine-3'-phosphate
  modified_base 7: mod_base = OTHER; note = 2'-O-methyl-guanosine-3'-phosphate
  modified_base 8: mod_base = OTHER; note = 2'-fluoro-guanosine-3'-phosphate
  modified_base 9: mod_base = OTHER; note = 2'-O-methyl-cytidine-3'-phosphate
  modified_base 10: mod_base = OTHER; note = 2'-O-methyl-adenosine-3'-phosphate
  modified_base 11: mod_base = OTHER; note = 2'-O-methyl-adenosine-3'-phosphate
  modified_base 12: mod_base = OTHER; note = 2'-O-methyl-adenosine-3'-phosphate
  modified_base 13: mod_base = OTHER; note = 2'-O-methyl-uridine-3'-phosphate
  modified_base 14: mod_base = OTHER; note = 2'-fluoro-adenosine-3'-phosphate
  modified_base 15: mod_base = OTHER; note = 2'-O-methyl-adenosine-3'-phosphate
  modified_base 16: mod_base = OTHER; note = 2'-fluoro-cytidine-3'-phosphate
  modified_base 17: mod_base = OTHER; note = 2'-O-methyl-adenosine-3'-phosphate
  modified_base 18: mod_base = OTHER; note = 2'-fluoro-uridine-3'-phosphate
  modified_base 19: mod_base = OTHER; note = 2'-O-methyl-guanosine-3'-phosphate
  modified_base 20: mod_base = OTHER; note = 2'-O-methyl-uridine-3'-phosphate
  modified_base 21: mod_base = OTHER; note = 2'-O-methyl-uridine-3'-phosphate
tcaaaaggcaaataacatgtt

SEQ ID NO: 913 - RNA, 19 nt, synthetic construct
  source 1..19: mol_type = other RNA
catgttatttgccttttga

SEQ ID NO: 914 - RNA, 21 nt, synthetic construct
  source 1..21: mol_type = other RNA
  modified_base 1: mod_base = OTHER; note = 2'-O-methyl-uridine-3'-phosphate
  modified_base 2: mod_base = OTHER; note = 2'-fluoro-cytidine-3'-phosphate
  modified_base 3: mod_base = OTHER; note = 2'-O-methyl-adenosine-3'-phosphate
  modified_base 4: mod_base = OTHER; note = 2'-fluoro-adenosine-3'-phosphate
  modified_base 5: mod_base = OTHER; note = 2'-O-methyl-adenosine-3'-phosphate
  modified_base 6: mod_base = OTHER; note = 2'-fluoro-adenosine-3'-phosphate
  modified_base 7: mod_base = OTHER; note = 2'-O-methyl-guanosine-3'-phosphate
  modified_base 8: mod_base = OTHER; note = 2'-fluoro-guanosine-3'-phosphate
  modified_base 9: mod_base = OTHER; note = 2'-O-methyl-cytidine-3'-phosphate
  modified_base 10: mod_base = OTHER; note = 2'-O-methyl-adenosine-3'-phosphate
  modified_base 11: mod_base = OTHER; note = 2'-O-methyl-adenosine-3'-phosphate
  modified_base 12: mod_base = OTHER; note = 2'-fluoro-adenosine-3'-phosphate
  modified_base 13: mod_base = OTHER; note = 2'-O-methyl-uridine-3'-phosphate
  modified_base 14: mod_base = OTHER; note = 2'-O-methyl-adenosine-3'-phosphate
  modified_base 15: mod_base = OTHER; note = 2'-O-methyl-adenosine-3'-phosphate
  modified_base 16: mod_base = OTHER; note = 2'-fluoro-cytidine-3'-phosphate
  modified_base 17: mod_base = OTHER; note = 2'-O-methyl-adenosine-3'-phosphate
  modified_base 18: mod_base = OTHER; note = 2'-fluoro-uridine-3'-phosphate
  modified_base 19: mod_base = OTHER; note = 2'-O-methyl-guanosine-3'-phosphate
  modified_base 20: mod_base = OTHER; note = 2'-O-methyl-uridine-3'-phosphate
  modified_base 21: mod_base = OTHER; note = 2'-O-methyl-uridine-3'-phosphate
tcaaaaggcaaataacatgtt

SEQ ID NO: 915 - RNA, 19 nt, synthetic construct
  source 1..19: mol_type = other RNA
catgttatttgccttttga

SEQ ID NO: 916 - RNA, 21 nt, synthetic construct
  source 1..21: mol_type = other RNA
  modified_base 1: mod_base = OTHER; note = 2'-O-methyl-uridine-3'-phosphate
  modified_base 2: mod_base = OTHER; note = 2'-fluoro-cytidine-3'-phosphate
  modified_base 3: mod_base = OTHER; note = 2'-O-methyl-adenosine-3'-phosphate
  modified_base 4: mod_base = OTHER; note = 2'-fluoro-adenosine-3'-phosphate
  modified_base 5: mod_base = OTHER; note = 2'-O-methyl-adenosine-3'-phosphate
  modified_base 6: mod_base = OTHER; note = 2'-fluoro-adenosine-3'-phosphate
  modified_base 7: mod_base = OTHER; note = 2'-O-methyl-guanosine-3'-phosphate
  modified_base 8: mod_base = OTHER; note = 2'-fluoro-guanosine-3'-phosphate
  modified_base 9: mod_base = OTHER; note = 2'-O-methyl-cytidine-3'-phosphate
  modified_base 10: mod_base = OTHER; note = 2'-O-methyl-adenosine-3'-phosphate
  modified_base 11: mod_base = OTHER; note = 2'-O-methyl-adenosine-3'-phosphate
  modified_base 12: mod_base = OTHER; note = 2'-fluoro-adenosine-3'-phosphate
  modified_base 13: mod_base = OTHER; note = 2'-O-methyl-uridine-3'-phosphate
  modified_base 14: mod_base = OTHER; note = 2'-fluoro-adenosine-3'-phosphate
  modified_base 15: mod_base = OTHER; note = 2'-O-methyl-adenosine-3'-phosphate
  modified_base 16: mod_base = OTHER; note = 2'-O-methyl-cytidine-3'-phosphate
  modified_base 17: mod_base = OTHER; note = 2'-O-methyl-adenosine-3'-phosphate
  modified_base 18: mod_base = OTHER; note = 2'-fluoro-uridine-3'-phosphate
  modified_base 19: mod_base = OTHER; note = 2'-O-methyl-guanosine-3'-phosphate
  modified_base 20: mod_base = OTHER; note = 2'-O-methyl-uridine-3'-phosphate
  modified_base 21: mod_base = OTHER; note = 2'-O-methyl-uridine-3'-phosphate
tcaaaaggcaaataacatgtt

SEQ ID NO: 917 - RNA, 19 nt, synthetic construct
  source 1..19: mol_type = other RNA
catgttatttgccttttga

SEQ ID NO: 918 - RNA, 21 nt, synthetic construct
  source 1..21: mol_type = other RNA
  modified_base 1: mod_base = OTHER; note = 2'-O-methyl-uridine-3'-phosphate
  modified_base 2: mod_base = OTHER; note = 2'-fluoro-cytidine-3'-phosphate
  modified_base 3: mod_base = OTHER; note = 2'-O-methyl-adenosine-3'-phosphate
  modified_base 4: mod_base = OTHER; note = 2'-fluoro-adenosine-3'-phosphate
  modified_base 5: mod_base = OTHER; note = 2'-O-methyl-adenosine-3'-phosphate
  modified_base 6: mod_base = OTHER; note = 2'-fluoro-adenosine-3'-phosphate
  modified_base 7: mod_base = OTHER; note = 2'-O-methyl-guanosine-3'-phosphate
  modified_base 8: mod_base = OTHER; note = 2'-fluoro-guanosine-3'-phosphate
  modified_base 9: mod_base = OTHER; note = 2'-O-methyl-cytidine-3'-phosphate
  modified_base 10: mod_base = OTHER; note = 2'-O-methyl-adenosine-3'-phosphate
  modified_base 11: mod_base = OTHER; note = 2'-O-methyl-adenosine-3'-phosphate
  modified_base 12: mod_base = OTHER; note = 2'-fluoro-adenosine-3'-phosphate
  modified_base 13: mod_base = OTHER; note = 2'-O-methyl-uridine-3'-phosphate
  modified_base 14: mod_base = OTHER; note = 2'-fluoro-adenosine-3'-phosphate
  modified_base 15: mod_base = OTHER; note = 2'-O-methyl-adenosine-3'-phosphate
  modified_base 16: mod_base = OTHER; note = 2'-fluoro-cytidine-3'-phosphate
  modified_base 17: mod_base = OTHER; note = 2'-O-methyl-adenosine-3'-phosphate
  modified_base 18: mod_base = OTHER; note = 2'-O-methyl-uridine-3'-phosphate
  modified_base 19: mod_base = OTHER; note = 2'-O-methyl-guanosine-3'-phosphate
  modified_base 20: mod_base = OTHER; note = 2'-O-methyl-uridine-3'-phosphate
  modified_base 21: mod_base = OTHER; note = 2'-O-methyl-uridine-3'-phosphate
tcaaaaggcaaataacatgtt

SEQ ID NO: 919 - RNA, 19 nt, synthetic construct
  source 1..19: mol_type = other RNA
catgttatttgccttttga

SEQ ID NO: 920 - RNA, 21 nt, synthetic construct
  source 1..21: mol_type = other RNA
  modified_base 1: mod_base = OTHER; note = 2'-O-methyl-uridine-3'-thiophosphate-phosphate
  modified_base 2: mod_base = OTHER; note = 2'-fluoro-cytidine-3'-phosphate
  modified_base 3: mod_base = OTHER; note = 2'-O-methyl-adenosine-3'-phosphate
  modified_base 4: mod_base = OTHER; note = 2'-fluoro-adenosine-3'-phosphate
  modified_base 5: mod_base = OTHER; note = 2'-O-methyl-adenosine-3'-phosphate
  modified_base 6: mod_base = OTHER; note = 2'-fluoro-adenosine-3'-phosphate
  modified_base 7: mod_base = OTHER; note = 2'-O-methyl-guanosine-3'-phosphate
  modified_base 8: mod_base = OTHER; note = 2'-fluoro-guanosine-3'-phosphate
  modified_base 9: mod_base = OTHER; note = 2'-O-methyl-cytidine-3'-phosphate
  modified_base 10: mod_base = OTHER; note = 2'-O-methyl-adenosine-3'-phosphate
  modified_base 11: mod_base = OTHER; note = 2'-O-methyl-adenosine-3'-phosphate
  modified_base 12: mod_base = OTHER; note = 2'-fluoro-adenosine-3'-phosphate
  modified_base 13: mod_base = OTHER; note = 2'-O-methyl-uridine-3'-phosphate
  modified_base 14: mod_base = OTHER; note = 2'-fluoro-adenosine-3'-phosphate
  modified_base 15: mod_base = OTHER; note = 2'-O-methyl-adenosine-3'-phosphate
  modified_base 16: mod_base = OTHER; note = 2'-fluoro-cytidine-3'-phosphate
  modified_base 17: mod_base = OTHER; note = 2'-O-methyl-adenosine-3'-phosphate
  modified_base 18: mod_base = OTHER; note = 2'-fluoro-uridine-3'-phosphate
  modified_base 19: mod_base = OTHER; note = 2'-O-methyl-guanosine-3'-phosphate
  modified_base 20: mod_base = OTHER; note = 2'-O-methyl-uridine-3'-thiophosphate-phosphate
  modified_base 21: mod_base = OTHER; note = 2'-O-methyl-uridine-3'-phosphate
tcaaaaggcaaataacatgtt

SEQ ID NO: 921 - RNA, 19 nt, synthetic construct
  source 1..19: mol_type = other RNA
catgttatttgccttttga

SEQ ID NO: 922 - RNA, 21 nt, synthetic construct
  source 1..21: mol_type = other RNA
  modified_base 1: mod_base = OTHER; note = 2'-O-methyl-uridine-3'-thiophosphate-phosphate
  modified_base 2: mod_base = OTHER; note = 2'-fluoro-cytidine-3'-thiophosphate-phosphate
  modified_base 3: mod_base = OTHER; note = 2'-O-methyl-adenosine-3'-phosphate
  modified_base 4: mod_base = OTHER; note = 2'-fluoro-adenosine-3'-phosphate
  modified_base 5: mod_base = OTHER; note = 2'-O-methyl-adenosine-3'-phosphate
  modified_base 6: mod_base = OTHER; note = 2'-fluoro-adenosine-3'-phosphate
  modified_base 7: mod_base = OTHER; note = 2'-O-methyl-guanosine-3'-phosphate
  modified_base 8: mod_base = OTHER; note = 2'-fluoro-guanosine-3'-phosphate
  modified_base 9: mod_base = OTHER; note = 2'-O-methyl-cytidine-3'-phosphate
  modified_base 10: mod_base = OTHER; note = 2'-O-methyl-adenosine-3'-phosphate
  modified_base 11: mod_base = OTHER; note = 2'-O-methyl-adenosine-3'-phosphate
  modified_base 12: mod_base = OTHER; note = 2'-fluoro-adenosine-3'-phosphate
  modified_base 13: mod_base = OTHER; note = 2'-O-methyl-uridine-3'-phosphate
  modified_base 14: mod_base = OTHER; note = 2'-fluoro-adenosine-3'-phosphate
  modified_base 15: mod_base = OTHER; note = 2'-O-methyl-adenosine-3'-phosphate
  modified_base 16: mod_base = OTHER; note = 2'-fluoro-cytidine-3'-phosphate
  modified_base 17: mod_base = OTHER; note = 2'-O-methyl-adenosine-3'-phosphate
  modified_base 18: mod_base = OTHER; note = 2'-fluoro-uridine-3'-phosphate
  modified_base 19: mod_base = OTHER; note = 2'-O-methyl-guanosine-3'-thiophosphate-phosphate
  modified_base 20: mod_base = OTHER; note = 2'-O-methyl-uridine-3'-thiophosphate-phosphate
  modified_base 21: mod_base = OTHER; note = 2'-O-methyl-uridine-3'-phosphate
tcaaaaggcaaataacatgtt

SEQ ID NO: 923 - RNA, 19 nt, synthetic construct
  source 1..19: mol_type = other RNA
catgttatttgccttttga

SEQ ID NO: 924 - RNA, 21 nt, synthetic construct
  source 1..21: mol_type = other RNA
  modified_base 1: mod_base = OTHER; note = 2'-O-methyl-uridine-3'-phosphate
  modified_base 2: mod_base = OTHER; note = 2'-deoxy-cytidine-3'-phosphate
  modified_base 3: mod_base = OTHER; note = 2'-O-methyl-adenosine-3'-phosphate
  modified_base 4: mod_base = OTHER; note = 2'-fluoro-adenosine-3'-phosphate
  modified_base 5: mod_base = OTHER; note = 2'-deoxy-adenosine-3'-phosphate
  modified_base 6: mod_base = OTHER; note = 2'-fluoro-adenosine-3'-phosphate
  modified_base 7: mod_base = OTHER; note = 2'-deoxy-guanosine-3'-phosphate
  modified_base 8: mod_base = OTHER; note = 2'-fluoro-guanosine-3'-phosphate
  modified_base 9: mod_base = OTHER; note = 2'-O-methyl-cytidine-3'-phosphate
  modified_base 10: mod_base = OTHER; note = 2'-O-methyl-adenosine-3'-phosphate
  modified_base 11: mod_base = OTHER; note = 2'-O-methyl-adenosine-3'-phosphate
  modified_base 12: mod_base = OTHER; note = 2'-deoxy-adenosine-3'-phosphate
  modified_base 13: mod_base = OTHER; note = 2'-O-methyl-uridine-3'-phosphate
  modified_base 14: mod_base = OTHER; note = 2'-fluoro-adenosine-3'-phosphate
  modified_base 15: mod_base = OTHER; note = 2'-O-methyl-adenosine-3'-phosphate
  modified_base 16: mod_base = OTHER; note = 2'-fluoro-cytidine-3'-phosphate
  modified_base 17: mod_base = OTHER; note = 2'-O-methyl-adenosine-3'-phosphate
  modified_base 18: mod_base = OTHER; note = 2'-fluoro-uridine-3'-phosphate
  modified_base 19: mod_base = OTHER; note = 2'-O-methyl-guanosine-3'-phosphate
  modified_base 20: mod_base = OTHER; note = 2'-O-methyl-uridine-3'-phosphate
  modified_base 21: mod_base = OTHER; note = 2'-O-methyl-uridine-3'-phosphate
tcaaaaggcaaataacatgtt

SEQ ID NO: 925 - RNA, 19 nt, synthetic construct
  source 1..19: mol_type = other RNA
catgttatttgccttttga

SEQ ID NO: 926 - RNA, 21 nt, synthetic construct
  source 1..21: mol_type = other RNA
  modified_base 1: mod_base = OTHER; note = 2'-O-methyl-uridine-3'-phosphate
  modified_base 2: mod_base = OTHER; note = 2'-fluoro-cytidine-3'-phosphate
  modified_base 3: mod_base = OTHER; note = 2'-O-methyl-adenosine-3'-phosphate
  modified_base 4: mod_base = OTHER; note = 2'-fluoro-adenosine-3'-phosphate
  modified_base 5: mod_base = OTHER; note = 2'-O-methyl-adenosine-3'-phosphate
  modified_base 6: mod_base = OTHER; note = 2'-fluoro-adenosine-3'-phosphate
  modified_base 7: mod_base = OTHER; note = 2'-O-methyl-hypoxanthine-3'-phosphate
  modified_base 8: mod_base = OTHER; note = 2'-fluoro-guanosine-3'-phosphate
  modified_base 9: mod_base = OTHER; note = 2'-O-methyl-cytidine-3'-phosphate
  modified_base 10: mod_base = OTHER; note = 2'-O-methyl-adenosine-3'-phosphate
  modified_base 11: mod_base = OTHER; note = 2'-O-methyl-adenosine-3'-phosphate
  modified_base 12: mod_base = OTHER; note = 2'-fluoro-adenosine-3'-phosphate
  modified_base 13: mod_base = OTHER; note = 2'-O-methyl-uridine-3'-phosphate
  modified_base 14: mod_base = OTHER; note = 2'-fluoro-adenosine-3'-phosphate
  modified_base 15: mod_base = OTHER; note = 2'-O-methyl-adenosine-3'-phosphate
  modified_base 16: mod_base = OTHER; note = 2'-fluoro-cytidine-3'-phosphate
  modified_base 17: mod_base = OTHER; note = 2'-O-methyl-adenosine-3'-phosphate
  modified_base 18: mod_base = OTHER; note = 2'-fluoro-uridine-3'-phosphate
tcaaaangcaaataacatgtt

SEQ ID NO: 927 - RNA, 19 nt, synthetic construct
  source 1..19: mol_type = other RNA
catgttatttgccttttga

SEQ ID NO: 928 - RNA, 21 nt, synthetic construct
  source 1..21: mol_type = other RNA
  modified_base 1: mod_base = OTHER; note = 2'-O-methyl-uridine-3'-phosphate
  modified_base 2: mod_base = OTHER; note = 2'-fluoro-cytidine-3'-phosphate
  modified_base 3: mod_base = OTHER; note = 2'-O-methyl-adenosine-3'-phosphate
  modified_base 4: mod_base = OTHER; note = 2'-fluoro-adenosine-3'-phosphate
  modified_base 5: mod_base = OTHER; note = 2'-O-methyl-adenosine-3'-phosphate
  modified_base 6: mod_base = OTHER; note = 2'-fluoro-adenosine-3'-phosphate
  modified_base 7: mod_base = OTHER; note = 2'-O-methyl-guanosine-3'-phosphate
  modified_base 8: mod_base = OTHER; note = 2'-fluoro-hypoxanthine-3'-phosphate
  modified_base 9: mod_base = OTHER; note = 2'-O-methyl-cytidine-3'-phosphate
  modified_base 10: mod_base = OTHER; note = 2'-O-methyl-adenosine-3'-phosphate
  modified_base 11: mod_base = OTHER; note = 2'-O-methyl-adenosine-3'-phosphate
  modified_base 12: mod_base = OTHER; note = 2'-fluoro-adenosine-3'-phosphate
  modified_base 13: mod_base = OTHER; note = 2'-O-methyl-uridine-3'-phosphate
  modified_base 14: mod_base = OTHER; note = 2'-fluoro-adenosine-3'-phosphate
  modified_base 15: mod_base = OTHER; note = 2'-O-methyl-adenosine-3'-phosphate
  modified_base 16: mod_base = OTHER; note = 2'-fluoro-cytidine-3'-phosphate
  modified_base 17: mod_base = OTHER; note = 2'-O-methyl-adenosine-3'-phosphate
  modified_base 18: mod_base = OTHER; note = 2'-fluoro-uridine-3'-phosphate
tcaaaagncaaataacatgtt

SEQ ID NO: 929 - RNA, 19 nt, synthetic construct
  source 1..19: mol_type = other RNA
  modified_base 1: mod_base = OTHER; note = 2'-O-methyl-cytidine-3'-phosphate
  modified_base 2: mod_base = OTHER; note = 2'-O-methyl-adenosine-3'-phosphate
  modified_base 3: mod_base = OTHER; note = 2'-O-methyl-uridine-3'-phosphate
  modified_base 4: mod_base = OTHER; note = 2'-O-methyl-guanosine-3'-phosphate
  modified_base 5: mod_base = OTHER; note = 2'-fluoro-uridine-3'-phosphate
  modified_base 6: mod_base = OTHER; note = 2'-fluoro-uridine-3'-phosphate
  modified_base 7: mod_base = OTHER; note = 2'-fluoro-adenosine-3'-phosphate
  modified_base 8: mod_base = OTHER; note = 2'-fluoro-uridine-3'-phosphate
  modified_base 9: mod_base = OTHER; note = 2'-fluoro-uridine-3'-phosphate
  modified_base 10: mod_base = OTHER; note = 2'-fluoro-uridine-3'-phosphate
  modified_base 11: mod_base = OTHER; note = 2'-O-methyl-guanosine-3'-phosphate
  modified_base 12: mod_base = OTHER; note = 2'-O-methyl-cytidine-3'-phosphate
  modified_base 13: mod_base = OTHER; note = 2'-O-methyl-cytidine-3'-phosphate
  modified_base 14: mod_base = OTHER; note = 2'-O-methyl-uridine-3'-phosphate
  modified_base 15: mod_base = OTHER; note = 2'-O-methyl-uridine-3'-phosphate
  modified_base 16: mod_base = OTHER; note = 2'-O-methyl-uridine-3'-phosphate
  modified_base 17: mod_base = OTHER; note = 2'-O-methyl-uridine-3'-phosphate
  modified_base 18: mod_base = OTHER; note = 2'-O-methyl-guanosine-3'-phosphate
  modified_base 19: mod_base = OTHER; note = 2'-O-methyl-adenosine-3'-phosphate
catgttatttgccttttga

SEQ ID NO: 930 - RNA, 21 nt, synthetic construct
  source 1..21: mol_type = other RNA
tcaaaaggcaaataacatgtt

SEQ ID NO: 931 - RNA, 19 nt, synthetic construct
  source 1..19: mol_type = other RNA
  modified_base 1: mod_base = OTHER; note = 2'-O-methyl-cytidine-3'-phosphate
  modified_base 2: mod_base = OTHER; note = 2'-O-methyl-adenosine-3'-phosphate
  modified_base 3: mod_base = OTHER; note = 2'-O-methyl-uridine-3'-phosphate
  modified_base 4: mod_base = OTHER; note = 2'-O-methyl-guanosine-3'-phosphate
  modified_base 5: mod_base = OTHER; note = 2'-O-methyl-uridine-3'-phosphate
  modified_base 6: mod_base = OTHER; note = 2'-fluoro-uridine-3'-phosphate
  modified_base 7: mod_base = OTHER; note = 2'-fluoro-adenosine-3'-phosphate
  modified_base 8: mod_base = OTHER; note = 2'-fluoro-uridine-3'-phosphate
  modified_base 9: mod_base = OTHER; note = 2'-fluoro-uridine-3'-phosphate
  modified_base 10: mod_base = OTHER; note = 2'-fluoro-uridine-3'-phosphate
  modified_base 11: mod_base = OTHER; note = 2'-O-methyl-guanosine-3'-phosphate
  modified_base 12: mod_base = OTHER; note = 2'-O-methyl-cytidine-3'-phosphate
  modified_base 13: mod_base = OTHER; note = 2'-O-methyl-cytidine-3'-phosphate
  modified_base 14: mod_base = OTHER; note = 2'-O-methyl-uridine-3'-phosphate
  modified_base 15: mod_base = OTHER; note = 2'-O-methyl-uridine-3'-phosphate
  modified_base 16: mod_base = OTHER; note = 2'-O-methyl-uridine-3'-phosphate
  modified_base 17: mod_base = OTHER; note = 2'-O-methyl-uridine-3'-phosphate
  modified_base 18: mod_base = OTHER; note = 2'-O-methyl-guanosine-3'-phosphate
  modified_base 19: mod_base = OTHER; note = 2'-O-methyl-adenosine-3'-phosphate
catgttatttgccttttga

SEQ ID NO: 932 - RNA, 21 nt, synthetic construct
  source 1..21: mol_type = other RNA
tcaaaaggcaaataacatgtt

SEQ ID NO: 933 - RNA, 19 nt, synthetic construct
  source 1..19: mol_type = other RNA
  modified_base 1: mod_base = OTHER; note = 2'-O-methyl-cytidine-3'-phosphate
  modified_base 2: mod_base = OTHER; note = 2'-O-methyl-adenosine-3'-phosphate
  modified_base 3: mod_base = OTHER; note = 2'-O-methyl-uridine-3'-phosphate
  modified_base 4: mod_base = OTHER; note = 2'-O-methyl-guanosine-3'-phosphate
  modified_base 5: mod_base = OTHER; note = 2'-O-methyl-uridine-3'-phosphate
  modified_base 6: mod_base = OTHER; note = 2'-O-methyl-uridine-3'-phosphate
  modified_base 7: mod_base = OTHER; note = 2'-fluoro-adenosine-3'-phosphate
  modified_base 8: mod_base = OTHER; note = 2'-fluoro-uridine-3'-phosphate
  modified_base 9: mod_base = OTHER; note = 2'-fluoro-uridine-3'-phosphate
  modified_base 10: mod_base = OTHER; note = 2'-fluoro-uridine-3'-phosphate
  modified_base 11: mod_base = OTHER; note = 2'-O-methyl-guanosine-3'-phosphate
  modified_base 12: mod_base = OTHER; note = 2'-O-methyl-cytidine-3'-phosphate
  modified_base 13: mod_base = OTHER; note = 2'-O-methyl-cytidine-3'-phosphate
  modified_base 14: mod_base = OTHER; note = 2'-O-methyl-uridine-3'-phosphate
  modified_base 15: mod_base = OTHER; note = 2'-O-methyl-uridine-3'-phosphate
  modified_base 16: mod_base = OTHER; note = 2'-O-methyl-uridine-3'-phosphate
  modified_base 17: mod_base = OTHER; note = 2'-O-methyl-uridine-3'-phosphate
  modified_base 18: mod_base = OTHER; note = 2'-O-methyl-guanosine-3'-phosphate
  modified_base 19: mod_base = OTHER; note = 2'-O-methyl-adenosine-3'-phosphate
catgttatttgccttttga

SEQ ID NO: 934 - RNA, 21 nt, synthetic construct
  source 1..21: mol_type = other RNA
tcaaaaggcaaataacatgtt

SEQ ID NO: 935 - RNA, 19 nt, synthetic construct
  source 1..19: mol_type = other RNA
  modified_base 1: mod_base = OTHER; note = 2'-O-methyl-cytidine-3'-phosphate
  modified_base 2: mod_base = OTHER; note = 2'-O-methyl-adenosine-3'-phosphate
  modified_base 3: mod_base = OTHER; note = 2'-O-methyl-uridine-3'-phosphate
  modified_base 4: mod_base = OTHER; note = 2'-O-methyl-guanosine-3'-phosphate
  modified_base 5: mod_base = OTHER; note = 2'-O-methyl-uridine-3'-phosphate
  modified_base 6: mod_base = OTHER; note = 2'-O-methyl-uridine-3'-phosphate
  modified_base 7: mod_base = OTHER; note = 2'-O-methyl-adenosine-3'-phosphate
  modified_base 8: mod_base = OTHER; note = 2'-fluoro-uridine-3'-phosphate
  modified_base 9: mod_base = OTHER; note = 2'-fluoro-uridine-3'-phosphate
  modified_base 10: mod_base = OTHER; note = 2'-fluoro-uridine-3'-phosphate
  modified_base 11: mod_base = OTHER; note = 2'-O-methyl-guanosine-3'-phosphate
  modified_base 12: mod_base = OTHER; note = 2'-O-methyl-cytidine-3'-phosphate
  modified_base 13: mod_base = OTHER; note = 2'-O-methyl-cytidine-3'-phosphate
  modified_base 14: mod_base = OTHER; note = 2'-O-methyl-uridine-3'-phosphate
  modified_base 15: mod_base = OTHER; note = 2'-O-methyl-uridine-3'-phosphate
  modified_base 16: mod_base = OTHER; note = 2'-O-methyl-uridine-3'-phosphate
  modified_base 17: mod_base = OTHER; note = 2'-O-methyl-uridine-3'-phosphate
  modified_base 18: mod_base = OTHER; note = 2'-O-methyl-guanosine-3'-phosphate
  modified_base 19: mod_base = OTHER; note = 2'-O-methyl-adenosine-3'-phosphate
catgttatttgccttttga

SEQ ID NO: 936 - RNA, 21 nt, synthetic construct
  source 1..21: mol_type = other RNA
tcaaaaggcaaataacatgtt

SEQ ID NO: 937 - RNA, 19 nt, synthetic construct
  source 1..19: mol_type = other RNA
  modified_base 1: mod_base = OTHER; note = 2'-O-methyl-cytidine-3'-phosphate
  modified_base 2: mod_base = OTHER; note = 2'-O-methyl-adenosine-3'-phosphate
  modified_base 3: mod_base = OTHER; note = 2'-O-methyl-uridine-3'-phosphate
  modified_base 4: mod_base = OTHER; note = 2'-O-methyl-guanosine-3'-phosphate
  modified_base 5: mod_base = OTHER; note = 2'-fluoro-uridine-3'-phosphate
  modified_base 6: mod_base = OTHER; note = 2'-O-methyl-uridine-3'-phosphate
  modified_base 7: mod_base = OTHER; note = 2'-O-methyl-adenosine-3'-phosphate
  modified_base 8: mod_base = OTHER; note = 2'-O-methyl-uridine-3'-phosphate
  modified_base 9: mod_base = OTHER; note = 2'-fluoro-uridine-3'-phosphate
  modified_base 10: mod_base = OTHER; note = 2'-fluoro-uridine-3'-phosphate
  modified_base 11: mod_base = OTHER; note = 2'-O-methyl-guanosine-3'-phosphate
  modified_base 12: mod_base = OTHER; note = 2'-O-methyl-cytidine-3'-phosphate
  modified_base 13: mod_base = OTHER; note = 2'-O-methyl-cytidine-3'-phosphate
  modified_base 14: mod_base = OTHER; note = 2'-O-methyl-uridine-3'-phosphate
  modified_base 15: mod_base = OTHER; note = 2'-O-methyl-uridine-3'-phosphate
  modified_base 16: mod_base = OTHER; note = 2'-O-methyl-uridine-3'-phosphate
  modified_base 17: mod_base = OTHER; note = 2'-O-methyl-uridine-3'-phosphate
  modified_base 18: mod_base = OTHER; note = 2'-O-methyl-guanosine-3'-phosphate
  modified_base 19: mod_base = OTHER; note = 2'-O-methyl-adenosine-3'-phosphate
catgttatttgccttttga

SEQ ID NO: 938 - RNA, 21 nt, synthetic construct
  source 1..21: mol_type = other RNA
tcaaaaggcaaataacatgtt

SEQ ID NO: 939 - RNA, 19 nt, synthetic construct
  source 1..19: mol_type = other RNA
  modified_base 1: mod_base = OTHER; note = 2'-O-methyl-cytidine-3'-phosphate
  modified_base 2: mod_base = OTHER; note = 2'-O-methyl-adenosine-3'-phosphate
  modified_base 3: mod_base = OTHER; note = 2'-O-methyl-uridine-3'-phosphate
  modified_base 4: mod_base = OTHER; note = 2'-O-methyl-guanosine-3'-phosphate
  modified_base 5: mod_base = OTHER; note = 2'-fluoro-uridine-3'-phosphate
  modified_base 6: mod_base = OTHER; note = 2'-fluoro-uridine-3'-phosphate
  modified_base 7: mod_base = OTHER; note = 2'-O-methyl-adenosine-3'-phosphate
  modified_base 8: mod_base = OTHER; note = 2'-O-methyl-uridine-3'-phosphate
  modified_base 9: mod_base = OTHER; note = 2'-O-methyl-uridine-3'-phosphate
  modified_base 10: mod_base = OTHER; note = 2'-fluoro-uridine-3'-phosphate
  modified_base 11: mod_base = OTHER; note = 2'-O-methyl-guanosine-3'-phosphate
  modified_base 12: mod_base = OTHER; note = 2'-O-methyl-cytidine-3'-phosphate
  modified_base 13: mod_base = OTHER; note = 2'-O-methyl-cytidine-3'-phosphate
  modified_base 14: mod_base = OTHER; note = 2'-O-methyl-uridine-3'-phosphate
  modified_base 15: mod_base = OTHER; note = 2'-O-methyl-uridine-3'-phosphate
  modified_base 16: mod_base = OTHER; note = 2'-O-methyl-uridine-3'-phosphate
  modified_base 17: mod_base = OTHER; note = 2'-O-methyl-uridine-3'-phosphate
  modified_base 18: mod_base = OTHER; note = 2'-O-methyl-guanosine-3'-phosphate
  modified_base 19: mod_base = OTHER; note = 2'-O-methyl-adenosine-3'-phosphate
catgttatttgccttttga

SEQ ID NO: 940 - RNA, 21 nt, synthetic construct
  source 1..21: mol_type = other RNA
tcaaaaggcaaataacatgtt

SEQ ID NO: 941 - RNA, 19 nt, synthetic construct
  source 1..19: mol_type = other RNA
  modified_base 1: mod_base = OTHER; note = 2'-O-methyl-cytidine-3'-phosphate
  modified_base 2: mod_base = OTHER; note = 2'-O-methyl-adenosine-3'-phosphate
  modified_base 3: mod_base = OTHER; note = 2'-O-methyl-uridine-3'-phosphate
  modified_base 4: mod_base = OTHER; note = 2'-O-methyl-guanosine-3'-phosphate
  modified_base 5: mod_base = OTHER; note = 2'-fluoro-uridine-3'-phosphate
  modified_base 6: mod_base = OTHER; note = 2'-fluoro-uridine-3'-phosphate
  modified_base 7: mod_base = OTHER; note = 2'-fluoro-adenosine-3'-phosphate
  modified_base 8: mod_base = OTHER; note = 2'-O-methyl-uridine-3'-phosphate
  modified_base 9: mod_base = OTHER; note = 2'-O-methyl-uridine-3'-phosphate
  modified_base 10: mod_base = OTHER; note = 2'-O-methyl-uridine-3'-phosphate
  modified_base 11: mod_base = OTHER; note = 2'-O-methyl-guanosine-3'-phosphate
  modified_base 12: mod_base = OTHER; note = 2'-O-methyl-cytidine-3'-phosphate
  modified_base 13: mod_base = OTHER; note = 2'-O-methyl-cytidine-3'-phosphate
  modified_base 14: mod_base = OTHER; note = 2'-O-methyl-uridine-3'-phosphate
  modified_base 15: mod_base = OTHER; note = 2'-O-methyl-uridine-3'-phosphate
  modified_base 16: mod_base = OTHER; note = 2'-O-methyl-uridine-3'-phosphate
  modified_base 17: mod_base = OTHER; note = 2'-O-methyl-uridine-3'-phosphate
  modified_base 18: mod_base = OTHER; note = 2'-O-methyl-guanosine-3'-phosphate
  modified_base 19: mod_base = OTHER; note = 2'-O-methyl-adenosine-3'-phosphate
catgttatttgccttttga

SEQ ID NO: 942 - RNA, 21 nt, synthetic construct
  source 1..21: mol_type = other RNA
tcaaaaggcaaataacatgtt

SEQ ID NO: 943 - RNA, 19 nt, synthetic construct
  source 1..19: mol_type = other RNA
  modified_base 1: mod_base = OTHER; note = 2'-O-methyl-cytidine-3'-phosphate
  modified_base 2: mod_base = OTHER; note = 2'-O-methyl-adenosine-3'-phosphate
  modified_base 3: mod_base = OTHER; note = 2'-O-methyl-uridine-3'-phosphate
  modified_base 4: mod_base = OTHER; note = 2'-O-methyl-guanosine-3'-phosphate
  modified_base 5: mod_base = OTHER; note = 2'-fluoro-uridine-3'-phosphate
  modified_base 6: mod_base = OTHER; note = 2'-fluoro-uridine-3'-phosphate
  modified_base 7: mod_base = OTHER; note = 2'-fluoro-adenosine-3'-phosphate
  modified_base 8: mod_base = OTHER; note = 2'-fluoro-uridine-3'-phosphate
  modified_base 9: mod_base = OTHER; note = 2'-O-methyl-uridine-3'-phosphate
  modified_base 10: mod_base = OTHER; note = 2'-O-methyl-uridine-3'-phosphate
  modified_base 11: mod_base = OTHER; note = 2'-O-methyl-guanosine-3'-phosphate
  modified_base 12: mod_base = OTHER; note = 2'-O-methyl-cytidine-3'-phosphate
  modified_base 13: mod_base = OTHER; note = 2'-O-methyl-cytidine-3'-phosphate
  modified_base 14: mod_base = OTHER; note = 2'-O-methyl-uridine-3'-phosphate
  modified_base 15: mod_base = OTHER; note = 2'-O-methyl-uridine-3'-phosphate
  modified_base 16: mod_base = OTHER; note = 2'-O-methyl-uridine-3'-phosphate
  modified_base 17: mod_base = OTHER; note = 2'-O-methyl-uridine-3'-phosphate
  modified_base 18: mod_base = OTHER; note = 2'-O-methyl-guanosine-3'-phosphate
  modified_base 19: mod_base = OTHER; note = 2'-O-methyl-adenosine-3'-phosphate
catgttatttgccttttga

SEQ ID NO: 944 - RNA, 21 nt, synthetic construct
  source 1..21: mol_type = other RNA
tcaaaaggcaaataacatgtt

SEQ ID NO: 945 - RNA, 19 nt, synthetic construct
  source 1..19: mol_type = other RNA
  modified_base 1: mod_base = OTHER; note = 2'-O-methyl-cytidine-3'-phosphate
  modified_base 2: mod_base = OTHER; note = 2'-O-methyl-adenosine-3'-phosphate
  modified_base 3: mod_base = OTHER; note = 2'-O-methyl-uridine-3'-phosphate
  modified_base 4: mod_base = OTHER; note = 2'-O-methyl-guanosine-3'-phosphate
  modified_base 5: mod_base = OTHER; note = 2'-fluoro-uridine-3'-phosphate
  modified_base 6: mod_base = OTHER; note = 2'-fluoro-uridine-3'-phosphate
  modified_base 7: mod_base = OTHER; note = 2'-fluoro-adenosine-3'-phosphate
  modified_base 8: mod_base = OTHER; note = 2'-fluoro-uridine-3'-phosphate
  modified_base 9: mod_base = OTHER; note = 2'-fluoro-uridine-3'-phosphate
  modified_base 10: mod_base = OTHER; note = 2'-O-methyl-uridine-3'-phosphate
  modified_base 11: mod_base = OTHER; note = 2'-O-methyl-guanosine-3'-phosphate
  modified_base 12: mod_base = OTHER; note = 2'-O-methyl-cytidine-3'-phosphate
  modified_base 13: mod_base = OTHER; note = 2'-O-methyl-cytidine-3'-phosphate
  modified_base 14: mod_base = OTHER; note = 2'-O-methyl-uridine-3'-phosphate
  modified_base 15: mod_base = OTHER; note = 2'-O-methyl-uridine-3'-phosphate
  modified_base 16: mod_base = OTHER; note = 2'-O-methyl-uridine-3'-phosphate
  modified_base 17: mod_base = OTHER; note = 2'-O-methyl-uridine-3'-phosphate
  modified_base 18: mod_base = OTHER; note = 2'-O-methyl-guanosine-3'-phosphate
  modified_base 19: mod_base = OTHER; note = 2'-O-methyl-adenosine-3'-phosphate
catgttatttgccttttga

SEQ ID NO: 946 - RNA, 21 nt, synthetic construct
  source 1..21: mol_type = other RNA
tcaaaaggcaaataacatgtt

SEQ ID NO: 947 - RNA, 19 nt, synthetic construct
  source 1..19: mol_type = other RNA
  modified_base 1: mod_base = OTHER; note = 2'-O-methyl-cytidine-3'-thiophosphate-phosphate
  modified_base 2: mod_base = OTHER; note = 2'-O-methyl-adenosine-3'-phosphate
  modified_base 3: mod_base = OTHER; note = 2'-O-methyl-uridine-3'-phosphate
  modified_base 4: mod_base = OTHER; note = 2'-O-methyl-guanosine-3'-phosphate
  modified_base 5: mod_base = OTHER; note = 2'-fluoro-uridine-3'-phosphate
  modified_base 6: mod_base = OTHER; note = 2'-fluoro-uridine-3'-phosphate
  modified_base 7: mod_base = OTHER; note = 2'-fluoro-adenosine-3'-phosphate
  modified_base 8: mod_base = OTHER; note = 2'-fluoro-uridine-3'-phosphate
  modified_base 9: mod_base = OTHER; note = 2'-fluoro-uridine-3'-phosphate
  modified_base 10: mod_base = OTHER; note = 2'-fluoro-uridine-3'-phosphate
  modified_base 11: mod_base = OTHER; note = 2'-O-methyl-guanosine-3'-phosphate
  modified_base 12: mod_base = OTHER; note = 2'-O-methyl-cytidine-3'-phosphate
  modified_base 13: mod_base = OTHER; note = 2'-O-methyl-cytidine-3'-phosphate
  modified_base 14: mod_base = OTHER; note = 2'-O-methyl-uridine-3'-phosphate
  modified_base 15: mod_base = OTHER; note = 2'-O-methyl-uridine-3'-phosphate
  modified_base 16: mod_base = OTHER; note = 2'-O-methyl-uridine-3'-phosphate
  modified_base 17: mod_base = OTHER; note = 2'-O-methyl-uridine-3'-phosphate
  modified_base 18: mod_base = OTHER; note = 2'-O-methyl-guanosine-3'-phosphate
  modified_base 19: mod_base = OTHER; note = 2'-O-methyl-adenosine-3'-phosphate
catgttatttgccttttga

SEQ ID NO: 948 - RNA, 21 nt, synthetic construct
  source 1..21: mol_type = other RNA
tcaaaaggcaaataacatgtt

SEQ ID NO: 949 - RNA, 19 nt, synthetic construct
  source 1..19: mol_type = other RNA
  modified_base 1: mod_base = OTHER; note = 2'-O-methyl-cytidine-3'-thiophosphate-phosphate
  modified_base 2: mod_base = OTHER; note = 2'-O-methyl-adenosine-3'-thiophosphate-phosphate
  modified_base 3: mod_base = OTHER; note = 2'-O-methyl-uridine-3'-phosphate
  modified_base 4: mod_base = OTHER; note = 2'-O-methyl-guanosine-3'-phosphate
  modified_base 5: mod_base = OTHER; note = 2'-fluoro-uridine-3'-phosphate
  modified_base 6: mod_base = OTHER; note = 2'-fluoro-uridine-3'-phosphate
  modified_base 7: mod_base = OTHER; note = 2'-fluoro-adenosine-3'-phosphate
  modified_base 8: mod_base = OTHER; note = 2'-fluoro-uridine-3'-phosphate
  modified_base 9: mod_base = OTHER; note = 2'-fluoro-uridine-3'-phosphate
  modified_base 10: mod_base = OTHER; note = 2'-fluoro-uridine-3'-phosphate
  modified_base 11: mod_base = OTHER; note = 2'-O-methyl-guanosine-3'-phosphate
  modified_base 12: mod_base = OTHER; note = 2'-O-methyl-cytidine-3'-phosphate
  modified_base 13: mod_base = OTHER; note = 2'-O-methyl-cytidine-3'-phosphate
  modified_base 14: mod_base = OTHER; note = 2'-O-methyl-uridine-3'-phosphate
  modified_base 15: mod_base = OTHER; note = 2'-O-methyl-uridine-3'-phosphate
  modified_base 16: mod_base = OTHER; note = 2'-O-methyl-uridine-3'-phosphate
  modified_base 17: mod_base = OTHER; note = 2'-O-methyl-uridine-3'-phosphate
  modified_base 18: mod_base = OTHER; note = 2'-O-methyl-guanosine-3'-phosphate
  modified_base 19: mod_base = OTHER; note = 2'-O-methyl-adenosine-3'-phosphate
catgttatttgccttttga

SEQ ID NO: 950 - RNA, 21 nt, synthetic construct
  source 1..21: mol_type = other RNA
tcaaaaggcaaataacatgtt

SEQ ID NO: 951 - RNA, 19 nt, synthetic construct
  source 1..19: mol_type = other RNA
  modified_base 1: mod_base = OTHER; note = 2'-O-methyl-cytidine-3'-thiophosphate-phosphate
  modified_base 2: mod_base = OTHER; note = 2'-O-methyl-adenosine-3'-thiophosphate-phosphate
  modified_base 3: mod_base = OTHER; note = 2'-O-methyl-uridine-3'-phosphate
  modified_base 4: mod_base = OTHER; note = 2'-O-methyl-guanosine-3'-phosphate
  modified_base 5: mod_base = OTHER; note = 2'-fluoro-uridine-3'-phosphate
  modified_base 6: mod_base = OTHER; note = 2'-fluoro-uridine-3'-phosphate
  modified_base 7: mod_base = OTHER; note = 2'-fluoro-adenosine-3'-phosphate
  modified_base 8: mod_base = OTHER; note = 2'-fluoro-uridine-3'-phosphate
  modified_base 9: mod_base = OTHER; note = 2'-fluoro-uridine-3'-phosphate
  modified_base 10: mod_base = OTHER; note = 2'-fluoro-uridine-3'-phosphate
  modified_base 11: mod_base = OTHER; note = 2'-O-methyl-guanosine-3'-phosphate
  modified_base 12: mod_base = OTHER; note = 2'-O-methyl-cytidine-3'-phosphate
  modified_base 13: mod_base = OTHER; note = 2'-O-methyl-cytidine-3'-phosphate
  modified_base 14: mod_base = OTHER; note = 2'-O-methyl-uridine-3'-phosphate
  modified_base 15: mod_base = OTHER; note = 2'-O-methyl-uridine-3'-phosphate
  modified_base 16: mod_base = OTHER; note = 2'-O-methyl-uridine-3'-phosphate
  modified_base 17: mod_base = OTHER; note = 2'-O-methyl-uridine-3'-phosphate
  modified_base 18: mod_base = OTHER; note = 2'-O-methyl-guanosine-3'-phosphate
  modified_base 19: mod_base = OTHER; note = 2'-O-methyl-adenosine-3'-phosphate
catgttatttgccttttga

SEQ ID NO: 952 - RNA, 21 nt, synthetic construct
  source 1..21: mol_type = other RNA
  modified_base 1: mod_base = OTHER; note = 2'-O-methyl-uridine-3'-thiophosphate-phosphate
  modified_base 2: mod_base = OTHER; note = 2'-fluoro-cytidine-3'-thiophosphate-phosphate
  modified_base 3: mod_base = OTHER; note = 2'-O-methyl-adenosine-3'-phosphate
  modified_base 4: mod_base = OTHER; note = 2'-fluoro-adenosine-3'-phosphate
  modified_base 5: mod_base = OTHER; note = 2'-O-methyl-adenosine-3'-phosphate
  modified_base 6: mod_base = OTHER; note = 2'-fluoro-adenosine-3'-phosphate
  modified_base 7: mod_base = OTHER; note = 2'-O-methyl-guanosine-3'-phosphate
  modified_base 8: mod_base = OTHER; note = 2'-fluoro-guanosine-3'-phosphate
  modified_base 9: mod_base = OTHER; note = 2'-O-methyl-cytidine-3'-phosphate
  modified_base 10: mod_base = OTHER; note = 2'-O-methyl-adenosine-3'-phosphate
  modified_base 11: mod_base = OTHER; note = 2'-O-methyl-adenosine-3'-phosphate
  modified_base 12: mod_base = OTHER; note = 2'-fluoro-adenosine-3'-phosphate
  modified_base 13: mod_base = OTHER; note = 2'-O-methyl-uridine-3'-phosphate
  modified_base 14: mod_base = OTHER; note = 2'-fluoro-adenosine-3'-phosphate
  modified_base 15: mod_base = OTHER; note = 2'-O-methyl-adenosine-3'-phosphate
  modified_base 16: mod_base = OTHER; note = 2'-fluoro-cytidine-3'-phosphate
  modified_base 17: mod_base = OTHER; note = 2'-O-methyl-adenosine-3'-phosphate
  modified_base 18: mod_base = OTHER; note = 2'-fluoro-uridine-3'-phosphate
  modified_base 19: mod_base = OTHER; note = 2'-O-methyl-guanosine-3'-thiophosphate-phosphate
  modified_base 20: mod_base = OTHER; note = 2'-O-methyl-uridine-3'-thiophosphate-phosphate
  modified_base 21: mod_base = OTHER; note = 2'-O-methyl-uridine-3'-phosphate
tcaaaaggcaaataacatgtt

SEQ ID NO: 953 - RNA, 19 nt, synthetic construct
  source 1..19: mol_type = other RNA
catgttatttgccttttga

SEQ ID NO: 954 - RNA, 21 nt, synthetic construct
  source 1..21: mol_type = other RNA
tcaaaaggcaaataacatgtt

SEQ ID NO: 955 - RNA, 19 nt, synthetic construct
  source 1..19: mol_type = other RNA
  modified_base 1: mod_base = OTHER; note = 2'-O-methyl-adenosine-3'-thiophosphate-phosphate
  modified_base 2: mod_base = OTHER; note = 2'-O-methyl-guanosine-3'-thiophosphate-phosphate
  modified_base 3: mod_base = OTHER; note = 2'-O-methyl-uridine-3'-phosphate
  modified_base 4: mod_base = OTHER; note = 2'-O-methyl-cytidine-3'-phosphate
  modified_base 5: mod_base = OTHER; note = 2'-O-methyl-adenosine-3'-phosphate
  modified_base 6: mod_base = OTHER; note = 2'-O-methyl-adenosine-3'-phosphate
  modified_base 7: mod_base = OTHER; note = 2'-O-methyl-adenosine-3'-phosphate
  modified_base 8: mod_base = OTHER; note = 2'-O-methyl-guanosine-3'-phosphate
  modified_base 9: mod_base = OTHER; note = 2'-O-methyl-cytidine-3'-phosphate
  modified_base 10: mod_base = OTHER; note = 2'-O-methyl-uridine-3'-phosphate
  modified_base 11: mod_base = OTHER; note = 2'-O-methyl-adenosine-3'-phosphate
  modified_base 12: mod_base = OTHER; note = 2'-O-methyl-uridine-3'-phosphate
  modified_base 13: mod_base = OTHER; note = 2'-O-methyl-uridine-3'-phosphate
  modified_base 14: mod_base = OTHER; note = 2'-O-methyl-uridine-3'-phosphate
  modified_base 15: mod_base = OTHER; note = 2'-O-methyl-uridine-3'-phosphate
  modified_base 16: mod_base = OTHER; note = 2'-O-methyl-cytidine-3'-phosphate
  modified_base 17: mod_base = OTHER; note = 2'-O-methyl-adenosine-3'-thiophosphate-phosphate
  modified_base 18: mod_base = OTHER; note = 2'-O-methyl-uridine-3'-thiophosphate-phosphate
  modified_base 19: mod_base = OTHER; note = 2'-O-methyl-adenosine-3'-phosphate
agtcaaagctattttcata

SEQ ID NO: 956 - RNA, 21 nt, synthetic construct
  source 1..21: mol_type = other RNA
  modified_base 1: mod_base = OTHER; note = 2'-O-methyl-uridine-3'-thiophosphate-phosphate
  modified_base 2: mod_base = OTHER; note = 2'-fluoro-adenosine-3'-thiophosphate-phosphate
  modified_base 3: mod_base = OTHER; note = 2'-O-methyl-uridine-3'-phosphate
  modified_base 4: mod_base = OTHER; note = 2'-O-methyl-guanosine-3'-phosphate
  modified_base 5: mod_base = OTHER; note = 2'-O-methyl-adenosine-3'-phosphate
  modified_base 6: mod_base = OTHER; note = 2'-fluoro-adenosine-3'-phosphate
  modified_base 7: mod_base = OTHER; note = 2'-O-methyl-adenosine-3'-phosphate
  modified_base 8: mod_base = OTHER; note = 2'-fluoro-adenosine-3'-phosphate
  modified_base 9: mod_base = OTHER; note = 2'-O-methyl-uridine-3'-phosphate
  modified_base 10: mod_base = OTHER; note = 2'-O-methyl-adenosine-3'-phosphate
  modified_base 11: mod_base = OTHER; note = 2'-O-methyl-guanosine-3'-phosphate
  modified_base 12: mod_base = OTHER; note = 2'-O-methyl-cytidine-3'-phosphate
  modified_base 13: mod_base = OTHER; note = 2'-O-methyl-uridine-3'-phosphate
  modified_base 14: mod_base = OTHER; note = 2'-fluoro-uridine-3'-phosphate
  modified_base 15: mod_base = OTHER; note = 2'-O-methyl-uridine-3'-phosphate
  modified_base 16: mod_base = OTHER; note = 2'-O-methyl-guanosine-3'-phosphate
  modified_base 17: mod_base = OTHER; note = 2'-O-methyl-adenosine-3'-phosphate
  modified_base 18: mod_base = OTHER; note = 2'-O-methyl-cytidine-3'-phosphate
  modified_base 19: mod_base = OTHER; note = 2'-O-methyl-uridine-3'-thiophosphate-phosphate
  modified_base 20: mod_base = OTHER; note = 2'-O-methyl-uridine-3'-thiophosphate-phosphate
  modified_base 21: mod_base = OTHER; note = 2'-O-methyl-uridine-3'-phosphate
tatgaaaatagctttgacttt

SEQ ID NO: 957 - RNA, 19 nt, synthetic construct
  source 1..19: mol_type = other RNA
  modified_base 1: mod_base = OTHER; note = 2'-O-methyl-adenosine-3'-thiophosphate-phosphate
  modified_base 2: mod_base = OTHER; note = 2'-O-methyl-guanosine-3'-thiophosphate-phosphate
  modified_base 3: mod_base = OTHER; note = 2'-O-methyl-uridine-3'-phosphate
  modified_base 4: mod_base = OTHER; note = 2'-O-methyl-cytidine-3'-phosphate
  modified_base 5: mod_base = OTHER; note = 2'-O-methyl-adenosine-3'-phosphate
  modified_base 6: mod_base = OTHER; note = 2'-O-methyl-adenosine-3'-phosphate
  modified_base 7: mod_base = OTHER; note = 2'-O-methyl-adenosine-3'-phosphate
  modified_base 8: mod_base = OTHER; note = 2'-O-methyl-guanosine-3'-phosphate
  modified_base 9: mod_base = OTHER; note = 2'-O-methyl-cytidine-3'-phosphate
  modified_base 10: mod_base = OTHER; note = 2'-O-methyl-uridine-3'-phosphate
  modified_base 11: mod_base = OTHER; note = 2'-O-methyl-adenosine-3'-phosphate
  modified_base 12: mod_base = OTHER; note = 2'-O-methyl-uridine-3'-phosphate
  modified_base 13: mod_base = OTHER; note = 2'-O-methyl-uridine-3'-phosphate
  modified_base 14: mod_base = OTHER; note = 2'-O-methyl-uridine-3'-phosphate
  modified_base 15: mod_base = OTHER; note = 2'-O-methyl-uridine-3'-phosphate
  modified_base 16: mod_base = OTHER; note = 2'-O-methyl-cytidine-3'-phosphate
  modified_base 17: mod_base = OTHER; note = 2'-O-methyl-adenosine-3'-thiophosphate-phosphate
  modified_base 18: mod_base = OTHER; note = 2'-O-methyl-uridine-3'-thiophosphate-phosphate
  modified_base 19: mod_base = OTHER; note = 2'-O-methyl-adenosine-3'-phosphate
agtcaaagctattttcata

SEQ ID NO: 958 - RNA, 21 nt, synthetic construct
  source 1..21: mol_type = other RNA
  modified_base 1: mod_base = OTHER; note = 2'-O-methyl-uridine-3'-thiophosphate-phosphate
  modified_base 2: mod_base = OTHER; note = 2'-fluoro-adenosine-3'-thiophosphate-phosphate
  modified_base 3: mod_base = OTHER; note = 2'-O-methyl-uridine-3'-phosphate
  modified_base 4: mod_base = OTHER; note = 2'-O-methyl-guanosine-3'-phosphate
  modified_base 5: mod_base = OTHER; note = 2'-fluoro-adenosine-3'-phosphate
  modified_base 6: mod_base = OTHER; note = 2'-fluoro-adenosine-3'-phosphate
  modified_base 7: mod_base = OTHER; note = 2'-O-methyl-adenosine-3'-phosphate
  modified_base 8: mod_base = OTHER; note = 2'-fluoro-adenosine-3'-phosphate
  modified_base 9: mod_base = OTHER; note = 2'-O-methyl-uridine-3'-phosphate
  modified_base 10: mod_base = OTHER; note = 2'-O-methyl-adenosine-3'-phosphate
  modified_base 11: mod_base = OTHER; note = 2'-O-methyl-guanosine-3'-phosphate
  modified_base 12: mod_base = OTHER; note = 2'-O-methyl-cytidine-3'-phosphate
  modified_base 13: mod_base = OTHER; note = 2'-O-methyl-uridine-3'-phosphate
  modified_base 14: mod_base = OTHER; note = 2'-fluoro-uridine-3'-phosphate
  modified_base 15: mod_base = OTHER; note = 2'-O-methyl-uridine-3'-phosphate
  modified_base 16: mod_base = OTHER; note = 2'-O-methyl-guanosine-3'-phosphate
  modified_base 17: mod_base = OTHER; note = 2'-O-methyl-adenosine-3'-phosphate
  modified_base 18: mod_base = OTHER; note = 2'-O-methyl-cytidine-3'-phosphate
  modified_base 19: mod_base = OTHER; note = 2'-O-methyl-uridine-3'-thiophosphate-phosphate
  modified_base 20: mod_base = OTHER; note = 2'-O-methyl-uridine-3'-thiophosphate-phosphate
  modified_base 21: mod_base = OTHER; note = 2'-O-methyl-uridine-3'-phosphate
tatgaaaatagctttgacttt

SEQ ID NO: 959 - RNA, 19 nt, synthetic construct
  source 1..19: mol_type = other RNA
  modified_base 1: mod_base = OTHER; note = 2'-O-methyl-adenosine-3'-thiophosphate-phosphate
  modified_base 2: mod_base = OTHER; note = 2'-O-methyl-guanosine-3'-thiophosphate-phosphate
  modified_base 3: mod_base = OTHER; note = 2'-O-methyl-uridine-3'-phosphate
  modified_base 4: mod_base = OTHER; note = 2'-O-methyl-cytidine-3'-phosphate
  modified_base 5: mod_base = OTHER; note = 2'-O-methyl-adenosine-3'-phosphate
  modified_base 6: mod_base = OTHER; note = 2'-O-methyl-adenosine-3'-phosphate
  modified_base 7: mod_base = OTHER; note = 2'-O-methyl-adenosine-3'-phosphate
  modified_base 8: mod_base = OTHER; note = 2'-O-methyl-guanosine-3'-phosphate
  modified_base 9: mod_base = OTHER; note = 2'-O-methyl-cytidine-3'-phosphate
  modified_base 10: mod_base = OTHER; note = 2'-O-methyl-uridine-3'-phosphate
  modified_base 11: mod_base = OTHER; note = 2'-O-methyl-adenosine-3'-phosphate
  modified_base 12: mod_base = OTHER; note = 2'-O-methyl-uridine-3'-phosphate
  modified_base 13: mod_base = OTHER; note = 2'-O-methyl-uridine-3'-phosphate
  modified_base 14: mod_base = OTHER; note = 2'-O-methyl-uridine-3'-phosphate
  modified_base 15: mod_base = OTHER; note = 2'-O-methyl-uridine-3'-phosphate
  modified_base 16: mod_base = OTHER; note = 2'-O-methyl-cytidine-3'-phosphate
  modified_base 17: mod_base = OTHER; note = 2'-O-methyl-adenosine-3'-thiophosphate-phosphate
  modified_base 18: mod_base = OTHER; note = 2'-O-methyl-uridine-3'-thiophosphate-phosphate
  modified_base 19: mod_base = OTHER; note = 2'-O-methyl-adenosine-3'-phosphate
agtcaaagctattttcata

SEQ ID NO: 960 - RNA, 21 nt, synthetic construct
  source 1..21: mol_type = other RNA
  modified_base 1: mod_base = OTHER; note = 2'-O-methyl-uridine-3'-thiophosphate-phosphate
  modified_base 2: mod_base = OTHER; note = 2'-fluoro-adenosine-3'-thiophosphate-phosphate
  modified_base 3: mod_base = OTHER; note = 2'-O-methyl-uridine-3'-phosphate
  modified_base 4: mod_base = OTHER; note = 2'-O-methyl-guanosine-3'-phosphate
  modified_base 5: mod_base = OTHER; note = 2'-O-methyl-adenosine-3'-phosphate
  modified_base 6: mod_base = OTHER; note = 2'-fluoro-adenosine-3'-phosphate
  modified_base 7: mod_base = OTHER; note = 2'-fluoro-adenosine-3'-phosphate
  modified_base 8: mod_base = OTHER; note = 2'-fluoro-adenosine-3'-phosphate
  modified_base 9: mod_base = OTHER; note = 2'-O-methyl-uridine-3'-phosphate
  modified_base 10: mod_base = OTHER; note = 2'-O-methyl-adenosine-3'-phosphate
  modified_base 11: mod_base = OTHER; note = 2'-O-methyl-guanosine-3'-phosphate
  modified_base 12: mod_base = OTHER; note = 2'-O-methyl-cytidine-3'-phosphate
  modified_base 13: mod_base = OTHER; note = 2'-O-methyl-uridine-3'-phosphate
  modified_base 14: mod_base = OTHER; note = 2'-fluoro-uridine-3'-phosphate
  modified_base 15: mod_base = OTHER; note = 2'-O-methyl-uridine-3'-phosphate
  modified_base 16: mod_base = OTHER; note = 2'-O-methyl-guanosine-3'-phosphate
  modified_base 17: mod_base = OTHER; note = 2'-O-methyl-adenosine-3'-phosphate
  modified_base 18: mod_base = OTHER; note = 2'-O-methyl-cytidine-3'-phosphate
  modified_base 19: mod_base = OTHER; note = 2'-O-methyl-uridine-3'-thiophosphate-phosphate
  modified_base 20: mod_base = OTHER; note = 2'-O-methyl-uridine-3'-thiophosphate-phosphate
  modified_base 21: mod_base = OTHER; note = 2'-O-methyl-uridine-3'-phosphate
tatgaaaatagctttgacttt

SEQ ID NO: 961 - RNA, 19 nt, synthetic construct
  source 1..19: mol_type = other RNA
  modified_base 1: mod_base = OTHER; note = 2'-O-methyl-adenosine-3'-thiophosphate-phosphate
  modified_base 2: mod_base = OTHER; note = 2'-O-methyl-guanosine-3'-thiophosphate-phosphate
  modified_base 3: mod_base = OTHER; note = 2'-O-methyl-uridine-3'-phosphate
  modified_base 4: mod_base = OTHER; note = 2'-O-methyl-cytidine-3'-phosphate
  modified_base 5: mod_base = OTHER; note = 2'-O-methyl-adenosine-3'-phosphate
  modified_base 6: mod_base = OTHER; note = 2'-O-methyl-adenosine-3'-phosphate
  modified_base 7: mod_base = OTHER; note = 2'-O-methyl-adenosine-3'-phosphate
  modified_base 8: mod_base = OTHER; note = 2'-O-methyl-guanosine-3'-phosphate
  modified_base 9: mod_base = OTHER; note = 2'-O-methyl-cytidine-3'-phosphate
  modified_base 10: mod_base = OTHER; note = 2'-O-methyl-uridine-3'-phosphate
  modified_base 11: mod_base = OTHER; note = 2'-O-methyl-adenosine-3'-phosphate
  modified_base 12: mod_base = OTHER; note = 2'-O-methyl-uridine-3'-phosphate
  modified_base 13: mod_base = OTHER; note = 2'-O-methyl-uridine-3'-phosphate
  modified_base 14: mod_base = OTHER; note = 2'-O-methyl-uridine-3'-phosphate
  modified_base 15: mod_base = OTHER; note = 2'-O-methyl-uridine-3'-phosphate
  modified_base 16: mod_base = OTHER; note = 2'-O-methyl-cytidine-3'-phosphate
  modified_base 17: mod_base = OTHER; note = 2'-O-methyl-adenosine-3'-thiophosphate-phosphate
  modified_base 18: mod_base = OTHER; note = 2'-O-methyl-uridine-3'-thiophosphate-phosphate
  modified_base 19: mod_base = OTHER; note = 2'-O-methyl-adenosine-3'-phosphate
agtcaaagctattttcata

SEQ ID NO: 962 - RNA, 21 nt, synthetic construct
  source 1..21: mol_type = other RNA
  modified_base 1: mod_base = OTHER; note = 2'-O-methyl-uridine-3'-thiophosphate-phosphate
  modified_base 2: mod_base = OTHER; note = 2'-fluoro-adenosine-3'-thiophosphate-phosphate
  modified_base 3: mod_base = OTHER; note = 2'-O-methyl-uridine-3'-phosphate
  modified_base 4: mod_base = OTHER; note = 2'-O-methyl-guanosine-3'-phosphate
  modified_base 5: mod_base = OTHER; note = 2'-fluoro-adenosine-3'-phosphate
  modified_base 6: mod_base = OTHER; note = 2'-fluoro-adenosine-3'-phosphate
  modified_base 7: mod_base = OTHER; note = 2'-fluoro-adenosine-3'-phosphate
  modified_base 8: mod_base = OTHER; note = 2'-fluoro-adenosine-3'-phosphate
  modified_base 9: mod_base = OTHER; note = 2'-O-methyl-uridine-3'-phosphate
  modified_base 10: mod_base = OTHER; note = 2'-O-methyl-adenosine-3'-phosphate
  modified_base 11: mod_base = OTHER; note = 2'-O-methyl-guanosine-3'-phosphate
  modified_base 12: mod_base = OTHER; note = 2'-O-methyl-cytidine-3'-phosphate
  modified_base 13: mod_base = OTHER; note = 2'-O-methyl-uridine-3'-phosphate
  modified_base 14: mod_base = OTHER; note = 2'-fluoro-uridine-3'-phosphate
  modified_base 15: mod_base = OTHER; note = 2'-O-methyl-uridine-3'-phosphate
  modified_base 16: mod_base = OTHER; note = 2'-O-methyl-guanosine-3'-phosphate
  modified_base 17: mod_base = OTHER; note = 2'-O-methyl-adenosine-3'-phosphate
  modified_base 18: mod_base = OTHER; note = 2'-O-methyl-cytidine-3'-phosphate
  modified_base 19: mod_base = OTHER; note = 2'-O-methyl-uridine-3'-thiophosphate-phosphate
  modified_base 20: mod_base = OTHER; note = 2'-O-methyl-uridine-3'-thiophosphate-phosphate
  modified_base 21: mod_base = OTHER; note = 2'-O-methyl-uridine-3'-phosphate
tatgaaaatagctttgacttt

SEQ ID NO: 963 - RNA, 19 nt, synthetic construct
  source 1..19: mol_type = other RNA
  modified_base 1: mod_base = OTHER; note = 2'-O-methyl-adenosine-3'-thiophosphate-phosphate
  modified_base 2: mod_base = OTHER; note = 2'-O-methyl-guanosine-3'-thiophosphate-phosphate
  modified_base 3: mod_base = OTHER; note = 2'-O-methyl-uridine-3'-phosphate
  modified_base 4: mod_base = OTHER; note = 2'-O-methyl-cytidine-3'-phosphate
  modified_base 5: mod_base = OTHER; note = 2'-O-methyl-adenosine-3'-phosphate
  modified_base 6: mod_base = OTHER; note = 2'-O-methyl-adenosine-3'-phosphate
  modified_base 7: mod_base = OTHER; note = 2'-O-methyl-adenosine-3'-phosphate
  modified_base 8: mod_base = OTHER; note = 2'-O-methyl-guanosine-3'-phosphate
  modified_base 9: mod_base = OTHER; note = 2'-O-methyl-cytidine-3'-phosphate
  modified_base 10: mod_base = OTHER; note = 2'-O-methyl-uridine-3'-phosphate
  modified_base 11: mod_base = OTHER; note = 2'-O-methyl-adenosine-3'-phosphate
  modified_base 12: mod_base = OTHER; note = 2'-O-methyl-uridine-3'-phosphate
  modified_base 13: mod_base = OTHER; note = 2'-O-methyl-uridine-3'-phosphate
  modified_base 14: mod_base = OTHER; note = 2'-O-methyl-uridine-3'-phosphate
  modified_base 15: mod_base = OTHER; note = 2'-O-methyl-uridine-3'-phosphate
  modified_base 16: mod_base = OTHER; note = 2'-O-methyl-cytidine-3'-phosphate
  modified_base 17: mod_base = OTHER; note = 2'-O-methyl-adenosine-3'-thiophosphate-phosphate
  modified_base 18: mod_base = OTHER; note = 2'-O-methyl-uridine-3'-thiophosphate-phosphate
  modified_base 19: mod_base = OTHER; note = 2'-O-methyl-adenosine-3'-phosphate
agtcaaagctattttcata

SEQ ID NO: 964 - RNA, 21 nt, synthetic construct
  source 1..21: mol_type = other RNA
  modified_base 1: mod_base = OTHER; note = 2'-O-methyl-uridine-3'-thiophosphate-phosphate
  modified_base 2: mod_base = OTHER; note = 2'-deoxy-adenosine-3'-thiophosphate-phosphate
  modified_base 3: mod_base = OTHER; note = 2'-O-methyl-uridine-3'-phosphate
  modified_base 4: mod_base = OTHER; note = 2'-fluoro-guanosine-3'-phosphate
  modified_base 5: mod_base = OTHER; note = 2'-deoxy-adenosine-3'-phosphate
  modified_base 6: mod_base = OTHER; note = 2'-fluoro-adenosine-3'-phosphate
  modified_base 7: mod_base = OTHER; note = 2'-deoxy-adenosine-3'-phosphate
  modified_base 8: mod_base = OTHER; note = 2'-fluoro-adenosine-3'-phosphate
  modified_base 9: mod_base = OTHER; note = 2'-O-methyl-uridine-3'-phosphate
  modified_base 10: mod_base = OTHER; note = 2'-O-methyl-adenosine-3'-phosphate
  modified_base 11: mod_base = OTHER; note = 2'-O-methyl-guanosine-3'-phosphate
  modified_base 12: mod_base = OTHER; note = 2'-deoxy-cytidine-3'-phosphate
  modified_base 13: mod_base = OTHER; note = 2'-O-methyl-uridine-3'-phosphate
  modified_base 14: mod_base = OTHER; note = 2'-fluoro-uridine-3'-phosphate
  modified_base 15: mod_base = OTHER; note = 2'-O-methyl-uridine-3'-phosphate
  modified_base 16: mod_base = OTHER; note = 2'-fluoro-guanosine-3'-phosphate
  modified_base 17: mod_base = OTHER; note = 2'-O-methyl-adenosine-3'-phosphate
  modified_base 18: mod_base = OTHER; note = 2'-fluoro-cytidine-3'-phosphate
  modified_base 19: mod_base = OTHER; note = 2'-O-methyl-uridine-3'-thiophosphate-phosphate
  modified_base 20: mod_base = OTHER; note = 2'-O-methyl-uridine-3'-thiophosphate-phosphate
  modified_base 21: mod_base = OTHER; note = 2'-O-methyl-uridine-3'-phosphate
tatgaaaatagctttgacttt

SEQ ID NO: 965 - RNA, 19 nt, synthetic construct
  source 1..19: mol_type = other RNA
  modified_base 1: mod_base = OTHER; note = 2'-O-methyl-cytidine-3'-thiophosphate-phosphate
  modified_base 2: mod_base = OTHER; note = 2'-O-methyl-guanosine-3'-thiophosphate-phosphate
  modified_base 3: mod_base = OTHER; note = 2'-O-methyl-uridine-3'-phosphate
  modified_base 4: mod_base = OTHER; note = 2'-O-methyl-cytidine-3'-phosphate
  modified_base 5: mod_base = OTHER; note = 2'-O-methyl-adenosine-3'-phosphate
  modified_base 6: mod_base = OTHER; note = 2'-O-methyl-adenosine-3'-phosphate
  modified_base 7: mod_base = OTHER; note = 2'-O-methyl-adenosine-3'-phosphate
  modified_base 8: mod_base = OTHER; note = 2'-O-methyl-guanosine-3'-phosphate
  modified_base 9: mod_base = OTHER; note = 2'-O-methyl-cytidine-3'-phosphate
  modified_base 10: mod_base = OTHER; note = 2'-O-methyl-uridine-3'-phosphate
  modified_base 11: mod_base = OTHER; note = 2'-O-methyl-adenosine-3'-phosphate
  modified_base 12: mod_base = OTHER; note = 2'-O-methyl-uridine-3'-phosphate
  modified_base 13: mod_base = OTHER; note = 2'-O-methyl-uridine-3'-phosphate
  modified_base 14: mod_base = OTHER; note = 2'-O-methyl-uridine-3'-phosphate
  modified_base 15: mod_base = OTHER; note = 2'-O-methyl-uridine-3'-phosphate
  modified_base 16: mod_base = OTHER; note = 2'-O-methyl-cytidine-3'-phosphate
  modified_base 17: mod_base = OTHER; note = 2'-O-methyl-adenosine-3'-thiophosphate-phosphate
  modified_base 18: mod_base = OTHER; note = 2'-O-methyl-uridine-3'-thiophosphate-phosphate
  modified_base 19: mod_base = OTHER; note = 2'-O-methyl-adenosine-3'-phosphate
cgtcaaagctattttcata

SEQ ID NO: 966 - RNA, 21 nt, synthetic construct
  source 1..21: mol_type = other RNA
  modified_base 1: mod_base = OTHER; note = 2'-O-methyl-uridine-3'-thiophosphate-phosphate
  modified_base 2: mod_base = OTHER; note = 2'-deoxy-adenosine-3'-thiophosphate-phosphate
  modified_base 3: mod_base = OTHER; note = 2'-O-methyl-uridine-3'-phosphate
  modified_base 4: mod_base = OTHER; note = 2'-fluoro-guanosine-3'-phosphate
  modified_base 5: mod_base = OTHER; note = 2'-deoxy-adenosine-3'-phosphate
  modified_base 6: mod_base = OTHER; note = 2'-fluoro-adenosine-3'-phosphate
  modified_base 7: mod_base = OTHER; note = 2'-deoxy-adenosine-3'-phosphate
  modified_base 8: mod_base = OTHER; note = 2'-fluoro-adenosine-3'-phosphate
  modified_base 9: mod_base = OTHER; note = 2'-O-methyl-uridine-3'-phosphate
  modified_base 10: mod_base = OTHER; note = 2'-O-methyl-adenosine-3'-phosphate
  modified_base 11: mod_base = OTHER; note = 2'-O-methyl-guanosine-3'-phosphate
  modified_base 12: mod_base = OTHER; note = 2'-deoxy-cytidine-3'-phosphate
  modified_base 13: mod_base = OTHER; note = 2'-O-methyl-uridine-3'-phosphate
  modified_base 14: mod_base = OTHER; note = 2'-fluoro-uridine-3'-phosphate
  modified_base 15: mod_base = OTHER; note = 2'-O-methyl-uridine-3'-phosphate
  modified_base 16: mod_base = OTHER; note = 2'-fluoro-guanosine-3'-phosphate
  modified_base 17: mod_base = OTHER; note = 2'-O-methyl-adenosine-3'-phosphate
  modified_base 18: mod_base = OTHER; note = 2'-fluoro-cytidine-3'-phosphate
  modified_base 19: mod_base = OTHER; note = 2'-O-methyl-guanosine-3'-thiophosphate-phosphate
  modified_base 20: mod_base = OTHER; note = 2'-O-methyl-uridine-3'-thiophosphate-phosphate
  modified_base 21: mod_base = OTHER; note = 2'-O-methyl-uridine-3'-phosphate
tatgaaaatagctttgacgtt

SEQ ID NO: 967 - RNA, 19 nt, synthetic construct
  source 1..19: mol_type = other RNA
  modified_base 1: mod_base = OTHER; note = 2'-O-methyl-adenosine-3'-thiophosphate-phosphate
  modified_base 2: mod_base = OTHER; note = 2'-O-methyl-guanosine-3'-thiophosphate-phosphate
  modified_base 3: mod_base = OTHER; note = 2'-O-methyl-uridine-3'-phosphate
  modified_base 4: mod_base = OTHER; note = 2'-O-methyl-cytidine-3'-phosphate
  modified_base 5: mod_base = OTHER; note = 2'-O-methyl-adenosine-3'-phosphate
  modified_base 6: mod_base = OTHER; note = 2'-O-methyl-adenosine-3'-phosphate
  modified_base 7: mod_base = OTHER; note = 2'-fluoro-adenosine-3'-phosphate
  modified_base 8: mod_base = OTHER; note = 2'-fluoro-guanosine-3'-phosphate
  modified_base 9: mod_base = OTHER; note = 2'-fluoro-cytidine-3'-phosphate
  modified_base 10: mod_base = OTHER; note = 2'-O-methyl-uridine-3'-phosphate
  modified_base 11: mod_base = OTHER; note = 2'-O-methyl-adenosine-3'-phosphate
  modified_base 12: mod_base = OTHER; note = 2'-O-methyl-uridine-3'-phosphate
  modified_base 13: mod_base = OTHER; note = 2'-O-methyl-uridine-3'-phosphate
  modified_base 14: mod_base = OTHER; note = 2'-O-methyl-uridine-3'-phosphate
  modified_base 15: mod_base = OTHER; note = 2'-O-methyl-uridine-3'-phosphate
  modified_base 16: mod_base = OTHER; note = 2'-O-methyl-cytidine-3'-phosphate
  modified_base 17: mod_base = OTHER; note = 2'-O-methyl-adenosine-3'-thiophosphate-phosphate
  modified_base 18: mod_base = OTHER; note = 2'-O-methyl-uridine-3'-thiophosphate-phosphate
  modified_base 19: mod_base = OTHER; note = 2'-O-methyl-adenosine-3'-phosphate
agtcaaagctattttcata

SEQ ID NO: 968 - RNA, 21 nt, synthetic construct
  source 1..21: mol_type = other RNA
  modified_base 1: mod_base = OTHER; note = 2'-O-methyl-uridine-3'-thiophosphate-phosphate
  modified_base 2: mod_base = OTHER; note = 2'-fluoro-adenosine-3'-thiophosphate-phosphate
  modified_base 3: mod_base = OTHER; note = 2'-O-methyl-uridine-3'-phosphate
  modified_base 4: mod_base = OTHER; note = 2'-O-methyl-guanosine-3'-phosphate
  modified_base 5: mod_base = OTHER; note = 2'-O-methyl-adenosine-3'-phosphate
  modified_base 6: mod_base = OTHER; note = 2'-fluoro-adenosine-3'-phosphate
  modified_base 7: mod_base = OTHER; note = 2'-O-methyl-adenosine-3'-phosphate
  modified_base 8: mod_base = OTHER; note = 2'-fluoro-adenosine-3'-phosphate
  modified_base 9: mod_base = OTHER; note = 2'-O-methyl-uridine-3'-phosphate
  modified_base 10: mod_base = OTHER; note = 2'-O-methyl-adenosine-3'-phosphate
  modified_base 11: mod_base = OTHER; note = 2'-O-methyl-guanosine-3'-phosphate
  modified_base 12: mod_base = OTHER; note = 2'-O-methyl-cytidine-3'-phosphate
  modified_base 13: mod_base = OTHER; note = 2'-O-methyl-uridine-3'-phosphate
  modified_base 14: mod_base = OTHER; note = 2'-fluoro-uridine-3'-phosphate
  modified_base 15: mod_base = OTHER; note = 2'-O-methyl-uridine-3'-phosphate
  modified_base 16: mod_base = OTHER; note = 2'-O-methyl-guanosine-3'-phosphate
  modified_base 17: mod_base = OTHER; note = 2'-O-methyl-adenosine-3'-phosphate
  modified_base 18: mod_base = OTHER; note = 2'-O-methyl-cytidine-3'-phosphate
  modified_base 19: mod_base = OTHER; note = 2'-O-methyl-uridine-3'-thiophosphate-phosphate
  modified_base 20: mod_base = OTHER; note = 2'-O-methyl-uridine-3'-thiophosphate-phosphate
  modified_base 21: mod_base = OTHER; note = 2'-O-methyl-uridine-3'-phosphate
tatgaaaatagctttgacttt

SEQ ID NO: 969 - RNA, 19 nt, synthetic construct
  source 1..19: mol_type = other RNA
  modified_base 1: mod_base = OTHER; note = 2'-O-methyl-cytidine-3'-thiophosphate-phosphate
  modified_base 2: mod_base = OTHER; note = 2'-O-methyl-adenosine-3'-thiophosphate-phosphate
  modified_base 3: mod_base = OTHER; note = 2'-O-methyl-uridine-3'-phosphate
  modified_base 4: mod_base = OTHER; note = 2'-O-methyl-guanosine-3'-phosphate
  modified_base 5: mod_base = OTHER; note = 2'-O-methyl-uridine-3'-phosphate
  modified_base 6: mod_base = OTHER; note = 2'-O-methyl-uridine-3'-phosphate
  modified_base 7: mod_base = OTHER; note = 2'-fluoro-adenosine-3'-phosphate
  modified_base 8: mod_base = OTHER; note = 2'-fluoro-uridine-3'-phosphate
  modified_base 9: mod_base = OTHER; note = 2'-fluoro-uridine-3'-phosphate
  modified_base 10: mod_base = OTHER; note = 2'-O-methyl-uridine-3'-phosphate
  modified_base 11: mod_base = OTHER; note = 2'-O-methyl-guanosine-3'-phosphate
  modified_base 12: mod_base = OTHER; note = 2'-O-methyl-cytidine-3'-phosphate
  modified_base 13: mod_base = OTHER; note = 2'-O-methyl-cytidine-3'-phosphate
  modified_base 14: mod_base = OTHER; note = 2'-O-methyl-uridine-3'-phosphate
  modified_base 15: mod_base = OTHER; note = 2'-O-methyl-uridine-3'-phosphate
  modified_base 16: mod_base = OTHER; note = 2'-O-methyl-uridine-3'-phosphate
  modified_base 17: mod_base = OTHER; note = 2'-O-methyl-uridine-3'-thiophosphate-phosphate
  modified_base 18: mod_base = OTHER; note = 2'-O-methyl-guanosine-3'-thiophosphate-phosphate
  modified_base 19: mod_base = OTHER; note = 2'-O-methyl-adenosine-3'-phosphate
catgttatttgccttttga

SEQ ID NO: 970 - RNA, 21 nt, synthetic construct
  source 1..21: mol_type = other RNA
  modified_base 1: mod_base = OTHER; note = 2'-O-methyl-uridine-3'-thiophosphate-phosphate
  modified_base 2: mod_base = OTHER; note = 2'-fluoro-cytidine-3'-thiophosphate-phosphate
  modified_base 3: mod_base = OTHER; note = 2'-O-methyl-adenosine-3'-phosphate
  modified_base 4: mod_base = OTHER; note = 2'-O-methyl-adenosine-3'-phosphate
  modified_base 5: mod_base = OTHER; note = 2'-O-methyl-adenosine-3'-phosphate
  modified_base 6: mod_base = OTHER; note = 2'-O-methyl-adenosine-3'-phosphate
  modified_base 7: mod_base = OTHER; note = 2'-O-methyl-guanosine-3'-phosphate
  modified_base 8: mod_base = OTHER; note = 2'-O-methyl-guanosine-3'-phosphate
  modified_base 9: mod_base = OTHER; note = 2'-O-methyl-cytidine-3'-phosphate
  modified_base 10: mod_base = OTHER; note = 2'-O-methyl-adenosine-3'-phosphate
  modified_base 11: mod_base = OTHER; note = 2'-O-methyl-adenosine-3'-phosphate
  modified_base 12: mod_base = OTHER; note = 2'-O-methyl-adenosine-3'-phosphate
  modified_base 13: mod_base = OTHER; note = 2'-O-methyl-uridine-3'-phosphate
  modified_base 14: mod_base = OTHER; note = 2'-fluoro-adenosine-3'-phosphate
  modified_base 15: mod_base = OTHER; note = 2'-O-methyl-adenosine-3'-phosphate
  modified_base 16: mod_base = OTHER; note = 2'-O-methyl-cytidine-3'-phosphate
  modified_base 17: mod_base = OTHER; note = 2'-O-methyl-adenosine-3'-phosphate
  modified_base 18: mod_base = OTHER; note = 2'-O-methyl-uridine-3'-phosphate
  modified_base 19: mod_base = OTHER; note = 2'-O-methyl-guanosine-3'-thiophosphate-phosphate
  modified_base 20: mod_base = OTHER; note = 2'-O-methyl-uridine-3'-thiophosphate-phosphate
  modified_base 21: mod_base = OTHER; note = 2'-O-methyl-uridine-3'-phosphate
tcaaaaggcaaataacatgtt

SEQ ID NO: 971 - RNA, 19 nt, synthetic construct
  source 1..19: mol_type = other RNA
  modified_base 1: mod_base = OTHER; note = 2'-O-methyl-cytidine-3'-thiophosphate-phosphate
  modified_base 2: mod_base = OTHER; note = 2'-O-methyl-adenosine-3'-thiophosphate-phosphate
  modified_base 3: mod_base = OTHER; note = 2'-O-methyl-uridine-3'-phosphate
  modified_base 4: mod_base = OTHER; note = 2'-O-methyl-guanosine-3'-phosphate
  modified_base 5: mod_base = OTHER; note = 2'-O-methyl-uridine-3'-phosphate
  modified_base 6: mod_base = OTHER; note = 2'-O-methyl-uridine-3'-phosphate
  modified_base 7: mod_base = OTHER; note = 2'-fluoro-adenosine-3'-phosphate
  modified_base 8: mod_base = OTHER; note = 2'-fluoro-uridine-3'-phosphate
  modified_base 9: mod_base = OTHER; note = 2'-fluoro-uridine-3'-phosphate
  modified_base 10: mod_base = OTHER; note = 2'-O-methyl-uridine-3'-phosphate
  modified_base 11: mod_base = OTHER; note = 2'-O-methyl-guanosine-3'-phosphate
  modified_base 12: mod_base = OTHER; note = 2'-O-methyl-cytidine-3'-phosphate
  modified_base 13: mod_base = OTHER; note = 2'-O-methyl-cytidine-3'-phosphate
  modified_base 14: mod_base = OTHER; note = 2'-O-methyl-uridine-3'-phosphate
  modified_base 15: mod_base = OTHER; note = 2'-O-methyl-uridine-3'-phosphate
  modified_base 16: mod_base = OTHER; note = 2'-O-methyl-uridine-3'-phosphate
  modified_base 17: mod_base = OTHER; note = 2'-O-methyl-uridine-3'-thiophosphate-phosphate
  modified_base 18: mod_base = OTHER; note = 2'-O-methyl-guanosine-3'-thiophosphate-phosphate
  modified_base 19: mod_base = OTHER; note = 2'-O-methyl-adenosine-3'-phosphate
catgttatttgccttttga

SEQ ID NO: 972 - RNA, 21 nt, synthetic construct
  source 1..21: mol_type = other RNA
  modified_base 1: mod_base = OTHER; note = 2'-O-methyl-uridine-3'-thiophosphate-phosphate
  modified_base 2: mod_base = OTHER; note = 2'-deoxy-cytidine-3'-thiophosphate-phosphate
  modified_base 3: mod_base = OTHER; note = 2'-O-methyl-adenosine-3'-phosphate
  modified_base 4: mod_base = OTHER; note = 2'-fluoro-adenosine-3'-phosphate
  modified_base 5: mod_base = OTHER; note = 2'-deoxy-adenosine-3'-phosphate
  modified_base 6: mod_base = OTHER; note = 2'-fluoro-adenosine-3'-phosphate
  modified_base 7: mod_base = OTHER; note = 2'-deoxy-guanosine-3'-phosphate
  modified_base 8: mod_base = OTHER; note = 2'-fluoro-guanosine-3'-phosphate
  modified_base 9: mod_base = OTHER; note = 2'-O-methyl-cytidine-3'-phosphate
  modified_base 10: mod_base = OTHER; note = 2'-O-methyl-adenosine-3'-phosphate
  modified_base 11: mod_base = OTHER; note = 2'-O-methyl-adenosine-3'-phosphate
  modified_base 12: mod_base = OTHER; note = 2'-deoxy-adenosine-3'-phosphate
  modified_base 13: mod_base = OTHER; note = 2'-O-methyl-uridine-3'-phosphate
  modified_base 14: mod_base = OTHER; note = 2'-fluoro-adenosine-3'-phosphate
  modified_base 15: mod_base = OTHER; note = 2'-O-methyl-adenosine-3'-phosphate
  modified_base 16: mod_base = OTHER; note = 2'-fluoro-cytidine-3'-phosphate
  modified_base 17: mod_base = OTHER; note = 2'-O-methyl-adenosine-3'-phosphate
  modified_base 18: mod_base = OTHER; note = 2'-fluoro-uridine-3'-phosphate
  modified_base 19: mod_base = OTHER; note = 2'-O-methyl-guanosine-3'-thiophosphate-phosphate
  modified_base 20: mod_base = OTHER; note = 2'-O-methyl-uridine-3'-thiophosphate-phosphate
  modified_base 21: mod_base = OTHER; note = 2'-O-methyl-uridine-3'-phosphate
tcaaaaggcaaataacatgtt

SEQ ID NO: 973 - RNA, 19 nt, synthetic construct
  source 1..19: mol_type = other RNA
  modified_base 1: mod_base = OTHER; note = 2'-O-methyl-cytidine-3'-thiophosphate-phosphate
  modified_base 2: mod_base = OTHER; note = 2'-O-methyl-adenosine-3'-thiophosphate-phosphate
  modified_base 3: mod_base = OTHER; note = 2'-O-methyl-uridine-3'-phosphate
  modified_base 4: mod_base = OTHER; note = 2'-O-methyl-guanosine-3'-phosphate
  modified_base 5: mod_base = OTHER; note = 2'-O-methyl-uridine-3'-phosphate
  modified_base 6: mod_base = OTHER; note = 2'-O-methyl-uridine-3'-phosphate
  modified_base 7: mod_base = OTHER; note = 2'-fluoro-adenosine-3'-phosphate
  modified_base 8: mod_base = OTHER; note = 2'-fluoro-uridine-3'-phosphate
  modified_base 9: mod_base = OTHER; note = 2'-fluoro-uridine-3'-phosphate
  modified_base 10: mod_base = OTHER; note = 2'-O-methyl-uridine-3'-phosphate
  modified_base 11: mod_base = OTHER; note = 2'-O-methyl-guanosine-3'-phosphate
  modified_base 12: mod_base = OTHER; note = 2'-O-methyl-cytidine-3'-phosphate
  modified_base 13: mod_base = OTHER; note = 2'-O-methyl-cytidine-3'-phosphate
  modified_base 14: mod_base = OTHER; note = 2'-O-methyl-uridine-3'-phosphate
  modified_base 15: mod_base = OTHER; note = 2'-O-methyl-uridine-3'-phosphate
  modified_base 16: mod_base = OTHER; note = 2'-O-methyl-uridine-3'-phosphate
  modified_base 17: mod_base = OTHER; note = 2'-O-methyl-uridine-3'-thiophosphate-phosphate
  modified_base 18: mod_base = OTHER; note = 2'-O-methyl-guanosine-3'-thiophosphate-phosphate
  modified_base 19: mod_base = OTHER; note = 2'-O-methyl-adenosine-3'-phosphate
catgttatttgccttttga

SEQ ID NO: 974 - RNA, 21 nt, synthetic construct
  source 1..21: mol_type = other RNA
  modified_base 1: mod_base = OTHER; note = 2'-O-methyl-uridine-3'-thiophosphate-phosphate
  modified_base 2: mod_base = OTHER; note = 2'-fluoro-cytidine-3'-thiophosphate-phosphate
  modified_base 3: mod_base = OTHER; note = 2'-O-methyl-adenosine-3'-phosphate
  modified_base 4: mod_base = OTHER; note = 2'-O-methyl-adenosine-3'-phosphate
  modified_base 5: mod_base = OTHER; note = 2'-O-methyl-adenosine-3'-phosphate
  modified_base 6: mod_base = OTHER; note = 2'-O-methyl-adenosine-3'-phosphate
  modified_base 7: mod_base = OTHER; note = 2'-O-methyl-guanosine-3'-phosphate
  modified_base 8: mod_base = OTHER; note = 2'-O-methyl-hypoxanthine-3'-phosphate
  modified_base 9: mod_base = OTHER; note = 2'-O-methyl-cytidine-3'-phosphate
  modified_base 10: mod_base = OTHER; note = 2'-O-methyl-adenosine-3'-phosphate
  modified_base 11: mod_base = OTHER; note = 2'-O-methyl-adenosine-3'-phosphate
  modified_base 12: mod_base = OTHER; note = 2'-O-methyl-adenosine-3'-phosphate
  modified_base 13: mod_base = OTHER; note = 2'-O-methyl-uridine-3'-phosphate
  modified_base 14: mod_base = OTHER; note = 2'-fluoro-adenosine-3'-phosphate
  modified_base 15: mod_base = OTHER; note = 2'-O-methyl-adenosine-3'-phosphate
  modified_base 16: mod_base = OTHER; note = 2'-O-methyl-cytidine-3'-phosphate
  modified_base 17: mod_base = OTHER; note = 2'-O-methyl-adenosine-3'-phosphate
  modified_base 18: mod_base = OTHER; note = 2'-O-methyl-uridine-3'-phosphate
  modified_base 19: mod_base = OTHER; note = 2'-O-methyl-guanosine-3'-thiophosphate-phosphate
  modified_base 20: mod_base = OTHER; note = 2'-O-methyl-uridine-3'-thiophosphate-phosphate
  modified_base 21: mod_base = OTHER; note = 2'-O-methyl-uridine-3'-phosphate
tcaaaagncaaataacatgtt

SEQ ID NO: 975 - RNA, 19 nt, synthetic construct
  source 1..19: mol_type = other RNA
gtgagggtcaagcacagct

SEQ ID NO: 976 - RNA, 21 nt, synthetic construct
  source 1..21: mol_type = other RNA
  modified_base 2: mod_base = OTHER; note = 2'-hypoxanthine-3'-phosphate
anctgtgcttgaccctcacag

SEQ ID NO: 977 - RNA, 19 nt, synthetic construct
  source 1..19: mol_type = other RNA
gagggtcaagcacagctat

SEQ ID NO: 978 - RNA, 21 nt, synthetic construct
  source 1..21: mol_type = other RNA
  modified_base 4: mod_base = OTHER; note = 2'-hypoxanthine-3'-phosphate
atanctgtgcttgaccctcac

SEQ ID NO: 979 - RNA, 19 nt, synthetic construct
  source 1..19: mol_type = other RNA
gggtcaagcacagctatcc

SEQ ID NO: 980 - RNA, 21 nt, synthetic construct
  source 1..21: mol_type = other RNA
  modified_base 2: mod_base = OTHER; note = 2'-hypoxanthine-3'-phosphate
gnatagctgtgcttgaccctc

SEQ ID NO: 981 - RNA, 19 nt, synthetic construct
  source 1..19: mol_type = other RNA
ggtcaagcacagctatcca

SEQ ID NO: 982 - RNA, 21 nt, synthetic construct
  source 1..21: mol_type = other RNA
  modified_base 2: mod_base = OTHER; note = 2'-hypoxanthine-3'-phosphate
tngatagctgtgcttgaccct

SEQ ID NO: 983 - RNA, 19 nt, synthetic construct
  source 1..19: mol_type = other RNA
gtcaagcacagctatccat

SEQ ID NO: 984 - RNA, 21 nt, synthetic construct
  source 1..21: mol_type = other RNA
  modified_base 3: mod_base = OTHER; note = 2'-hypoxanthine-3'-phosphate
atngatagctgtgcttgaccc

SEQ ID NO: 985 - RNA, 19 nt, synthetic construct
  source 1..19: mol_type = other RNA
tcaagcacagctatccatc

SEQ ID NO: 986 - RNA, 21 nt, synthetic construct
  source 1..21: mol_type = other RNA
  modified_base 4: mod_base = OTHER; note = 2'-hypoxanthine-3'-phosphate
gatngatagctgtgcttgacc

SEQ ID NO: 987 - RNA, 19 nt, synthetic construct
  source 1..19: mol_type = other RNA
caagcacagctatccatca

SEQ ID NO: 988 - RNA, 21 nt, synthetic construct
  source 1..21: mol_type = other RNA
  modified_base 2: mod_base = OTHER; note = 2'-hypoxanthine-3'-phosphate
tnatggatagctgtgcttgac

SEQ ID NO: 989 - RNA, 19 nt, synthetic construct
  source 1..19: mol_type = other RNA
aagcacagctatccatcag

SEQ ID NO: 990 - RNA, 21 nt, synthetic construct
  source 1..21: mol_type = other RNA
  modified_base 3: mod_base = OTHER; note = 2'-hypoxanthine-3'-phosphate
ctnatggatagctgtgcttga

SEQ ID NO: 991 - RNA, 19 nt, synthetic construct
  source 1..19: mol_type = other RNA
agcacagctatccatcaga

SEQ ID NO: 992 - RNA, 21 nt, synthetic construct
  source 1..21: mol_type = other RNA
  modified_base 4: mod_base = OTHER; note = 2'-hypoxanthine-3'-phosphate
tctnatggatagctgtgcttg

SEQ ID NO: 993 - RNA, 19 nt, synthetic construct
  source 1..19: mol_type = other RNA
gcacagctatccatcagat

SEQ ID NO: 994 - RNA, 21 nt, synthetic construct
  source 1..21: mol_type = other RNA
  modified_base 5: mod_base = OTHER; note = 2'-hypoxanthine-3'-phosphate
atctnatggatagctgtgctt

SEQ ID NO: 995 - RNA, 19 nt, synthetic construct
  source 1..19: mol_type = other RNA
cacagctatccatcagatg

SEQ ID NO: 996 - RNA, 21 nt, synthetic construct
  source 1..21: mol_type = other RNA
  modified_base 6: mod_base = OTHER; note = 2'-hypoxanthine-3'-phosphate
catctnatggatagctgtgct

SEQ ID NO: 997 - RNA, 19 nt, synthetic construct
  source 1..19: mol_type = other RNA
acagctatccatcagatga

SEQ ID NO: 998 - RNA, 21 nt, synthetic construct
  source 1..21: mol_type = other RNA
  modified_base 7: mod_base = OTHER; note = 2'-hypoxanthine-3'-phosphate
tcatctnatggatagctgtgc

SEQ ID NO: 999 - RNA, 19 nt, synthetic construct
  source 1..19: mol_type = other RNA
cagctatccatcagatgat

SEQ ID NO: 1000 - RNA, 21 nt, synthetic construct
  source 1..21: mol_type = other RNA
  modified_base 8: mod_base = OTHER; note = 2'-hypoxanthine-3'-phosphate
atcatctnatggatagctgtg

SEQ ID NO: 1001 - RNA, 19 nt, synthetic construct
  source 1..19: mol_type = other RNA
gctatccatcagatgatct

SEQ ID NO: 1002 - RNA, 21 nt, synthetic construct
  source 1..21: mol_type = other RNA
  modified_base 2: mod_base = OTHER; note = 2'-hypoxanthine-3'-phosphate
anatcatctgatggatagctg

SEQ ID NO: 1003 - RNA, 19 nt, synthetic construct
  source 1..19: mol_type = other RNA
ctatccatcagatgatcta

SEQ ID NO: 1004 - RNA, 21 nt, synthetic construct
  source 1..21: mol_type = other RNA
  modified_base 3: mod_base = OTHER; note = 2'-hypoxanthine-3'-phosphate
tanatcatctgatggatagct

SEQ ID NO: 1005 - RNA, 19 nt, synthetic construct
  source 1..19: mol_type = other RNA
atccatcagatgatctact

SEQ ID NO: 1006 - RNA, 21 nt, synthetic construct
  source 1..21: mol_type = other RNA
  modified_base 2: mod_base = OTHER; note = 2'-hypoxanthine-3'-phosphate
antagatcatctgatggatag

SEQ ID NO: 1007 - RNA, 19 nt, synthetic construct
  source 1..19: mol_type = other RNA
tccatcagatgatctactt

SEQ ID NO: 1008 - RNA, 21 nt, synthetic construct
  source 1..21: mol_type = other RNA
  modified_base 3: mod_base = OTHER; note = 2'-hypoxanthine-3'-phosphate
aantagatcatctgatggata

SEQ ID NO: 1009 - RNA, 19 nt, synthetic construct
  source 1..19: mol_type = other RNA
ccatcagatgatctacttt

SEQ ID NO: 1010 - RNA, 21 nt, synthetic construct
  source 1..21: mol_type = other RNA
  modified_base 4: mod_base = OTHER; note = 2'-hypoxanthine-3'-phosphate
aaantagatcatctgatggat

SEQ ID NO: 1011 - RNA, 19 nt, synthetic construct
  source 1..19: mol_type = other RNA
catcagatgatctactttc

SEQ ID NO: 1012 - RNA, 21 nt, synthetic construct
  source 1..21: mol_type = other RNA
  modified_base 5: mod_base = OTHER; note = 2'-hypoxanthine-3'-phosphate
gaaantagatcatctgatgga

SEQ ID NO: 1013 - RNA, 19 nt, synthetic construct
  source 1..19: mol_type = other RNA
atcagatgatctactttca

SEQ ID NO: 1014 - RNA, 21 nt, synthetic construct
  source 1..21: mol_type = other RNA
  modified_base 2: mod_base = OTHER; note = 2'-hypoxanthine-3'-phosphate
tnaaagtagatcatctgatgg

SEQ ID NO: 1015 - RNA, 19 nt, synthetic construct
  source 1..19: mol_type = other RNA
cagatgatctactttcagc

SEQ ID NO: 1016 - RNA, 21 nt, synthetic construct
  source 1..21: mol_type = other RNA
  modified_base 4: mod_base = OTHER; note = 2'-hypoxanthine-3'-phosphate
gctnaaagtagatcatctgat

SEQ ID NO: 1017 - RNA, 19 nt, synthetic construct
  source 1..19: mol_type = other RNA
gatgatctactttcagcct

SEQ ID NO: 1018 - RNA, 21 nt, synthetic construct
  source 1..21: mol_type = other RNA
  modified_base 2: mod_base = OTHER; note = 2'-hypoxanthine-3'-phosphate
angctgaaagtagatcatctg

SEQ ID NO: 1019 - RNA, 19 nt, synthetic construct
  source 1..19: mol_type = other RNA
atgatctactttcagcctt

SEQ ID NO: 1020 - RNA, 21 nt, synthetic construct
  source 1..21: mol_type = other RNA
  modified_base 3: mod_base = OTHER; note = 2'-hypoxanthine-3'-phosphate
aangctgaaagtagatcatct

SEQ ID NO: 1021 - RNA, 19 nt, synthetic construct
  source 1..19: mol_type = other RNA
ttcctgagtcccagacaat

SEQ ID NO: 1022 - RNA, 21 nt, synthetic construct
  source 1..21: mol_type = other RNA
  modified_base 4: mod_base = OTHER; note = 2'-hypoxanthine-3'-phosphate
attntctgggactcaggaagg

SEQ ID NO: 1023 - RNA, 19 nt, synthetic construct
  source 1..19: mol_type = other RNA
tcctgagtcccagacaata

SEQ ID NO: 1024 - RNA, 21 nt, synthetic construct
  source 1..21: mol_type = other RNA
  modified_base 5: mod_base = OTHER; note = 2'-hypoxanthine-3'-phosphate
tattntctgggactcaggaag

SEQ ID NO: 1025 - RNA, 19 nt, synthetic construct
  source 1..19: mol_type = other RNA
tgagtcccagacaatagaa

SEQ ID NO: 1026 - RNA, 21 nt, synthetic construct
  source 1..21: mol_type = other RNA
  modified_base 8: mod_base = OTHER; note = 2'-hypoxanthine-3'-phosphate
ttctattntctgggactcagg

SEQ ID NO: 1027 - RNA, 19 nt, synthetic construct
  source 1..19: mol_type = other RNA
caatagaagacaggtggct

SEQ ID NO: 1028 - RNA, 21 nt, synthetic construct
  source 1..21: mol_type = other RNA
  modified_base 2: mod_base = OTHER; note = 2'-hypoxanthine-3'-phosphate
anccacctgtcttctattgtc

SEQ ID NO: 1029 - RNA, 19 nt, synthetic construct
  source 1..19: mol_type = other RNA
atagaagacaggtggctgt

SEQ ID NO: 1030 - RNA, 21 nt, synthetic construct
  source 1..21: mol_type = other RNA
  modified_base 4: mod_base = OTHER; note = 2'-hypoxanthine-3'-phosphate
acanccacctgtcttctattg

SEQ ID NO: 1031 - RNA, 19 nt, synthetic construct
  source 1..19: mol_type = other RNA
aggtgtggcagtggtgtct

SEQ ID NO: 1032 - RNA, 21 nt, synthetic construct
  source 1..21: mol_type = other RNA
  modified_base 2: mod_base = OTHER; note = 2'-hypoxanthine-3'-phosphate
anacaccactgccacacctac

SEQ ID NO: 1033 - RNA, 19 nt, synthetic construct
  source 1..19: mol_type = other RNA
cattggcccccagcaatca

SEQ ID NO: 1034 - RNA, 21 nt, synthetic construct
  source 1..21: mol_type = other RNA
  modified_base 2: mod_base = OTHER; note = 2'-hypoxanthine-3'-phosphate
tnattgctgggggccaatgag

SEQ ID NO: 1035 - RNA, 19 nt, synthetic construct
  source 1..19: mol_type = other RNA
agctagccaagcagcaaat

SEQ ID NO: 1036 - RNA, 21 nt, synthetic construct
  source 1..21: mol_type = other RNA
  modified_base 5: mod_base = OTHER; note = 2'-hypoxanthine-3'-phosphate
atttnctgcttggctagctcc

SEQ ID NO: 1037 - RNA, 19 nt, synthetic construct
  source 1..19: mol_type = other RNA
tagccaagcagcaaatcct

SEQ ID NO: 1038 - RNA, 21 nt, synthetic construct
  source 1..21: mol_type = other RNA
  modified_base 2: mod_base = OTHER; note = 2'-hypoxanthine-3'-phosphate
angatttgctgcttggctagc

SEQ ID NO: 1039 - RNA, 19 nt, synthetic construct
  source 1..19: mol_type = other RNA
accagtcgtcccagaataa

SEQ ID NO: 1040 - RNA, 21 nt, synthetic construct
  source 1..21: mol_type = other RNA
  modified_base 8: mod_base = OTHER; note = 2'-hypoxanthine-3'-phosphate
ttattctnggacgactggtca

SEQ ID NO: 1041 - RNA, 19 nt, synthetic construct
  source 1..19: mol_type = other RNA
cagtcgtcccagaataact

SEQ ID NO: 1042 - RNA, 21 nt, synthetic construct
  source 1..21: mol_type = other RNA
  modified_base 2: mod_base = OTHER; note = 2'-hypoxanthine-3'-phosphate
anttattctgggacgactggt

SEQ ID NO: 1043 - RNA, 19 nt, synthetic construct
  source 1..19: mol_type = other RNA
agtcgtcccagaataactc

SEQ ID NO: 1044 - RNA, 21 nt, synthetic construct
  source 1..21: mol_type = other RNA
  modified_base 3: mod_base = OTHER; note = 2'-hypoxanthine-3'-phosphate
ganttattctgggacgactgg

SEQ ID NO: 1045 - RNA, 19 nt, synthetic construct
  source 1..19: mol_type = other RNA
tcgtcccagaataactcat

SEQ ID NO: 1046 - RNA, 21 nt, synthetic construct
  source 1..21: mol_type = other RNA
  modified_base 3: mod_base = OTHER; note = 2'-hypoxanthine-3'-phosphate
atnagttattctgggacgact

SEQ ID NO: 1047 - RNA, 19 nt, synthetic construct
  source 1..19: mol_type = other RNA
ggaatggggaggaggtcat

SEQ ID NO: 1048 - RNA, 21 nt, synthetic construct
  source 1..21: mol_type = other RNA
  modified_base 3: mod_base = OTHER; note = 2'-hypoxanthine-3'-phosphate
atnacctcctccccattccct

SEQ ID NO: 1049 - RNA, 19 nt, synthetic construct
  source 1..19: mol_type = other RNA
gaggtcatcagctttgcta

SEQ ID NO: 1050 - RNA, 21 nt, synthetic construct
  source 1..21: mol_type = other RNA
  modified_base 3: mod_base = OTHER; note = 2'-hypoxanthine-3'-phosphate
tancaaagctgatgacctcct

SEQ ID NO: 1051 - RNA, 19 nt, synthetic construct
  source 1..19: mol_type = other RNA
ggtcatcagctttgctact

SEQ ID NO: 1052 - RNA, 21 nt, synthetic construct
  source 1..21: mol_type = other RNA
  modified_base 2: mod_base = OTHER; note = 2'-hypoxanthine-3'-phosphate
antagcaaagctgatgacctc

SEQ ID NO: 1053 - RNA, 19 nt, synthetic construct
  source 1..19: mol_type = other RNA
gtcatcagctttgctactg

SEQ ID NO: 1054 - RNA, 21 nt, synthetic construct
  source 1..21: mol_type = other RNA
  modified_base 3: mod_base = OTHER; note = 2'-hypoxanthine-3'-phosphate
cantagcaaagctgatgacct

SEQ ID NO: 1055 - RNA, 19 nt, synthetic construct
  source 1..19: mol_type = other RNA
tcatcagctttgctactgt

SEQ ID NO: 1056 - RNA, 21 nt, synthetic construct
  source 1..21: mol_type = other RNA
  modified_base 4: mod_base = OTHER; note = 2'-hypoxanthine-3'-phosphate
acantagcaaagctgatgacc

SEQ ID NO: 1057 - RNA, 19 nt, synthetic construct
  source 1..19: mol_type = other RNA
catcagctttgctactgtc

SEQ ID NO: 1058 - RNA, 21 nt, synthetic construct
  source 1..21: mol_type = other RNA
  modified_base 5: mod_base = OTHER; note = 2'-hypoxanthine-3'-phosphate
gacantagcaaagctgatgac

SEQ ID NO: 1059 - RNA, 19 nt, synthetic construct
  source 1..19: mol_type = other RNA
gctttgctactgtcacaga

SEQ ID NO: 1060 - RNA, 21 nt, synthetic construct
  source 1..21: mol_type = other RNA
  modified_base 4: mod_base = OTHER; note = 2'-hypoxanthine-3'-phosphate
tctntgacagtagcaaagctg

SEQ ID NO: 1061 - RNA, 19 nt, synthetic construct
  source 1..19: mol_type = other RNA
tttgctactgtcacagact

SEQ ID NO: 1062 - RNA, 21 nt, synthetic construct
  source 1..21: mol_type = other RNA
  modified_base 2: mod_base = OTHER; note = 2'-hypoxanthine-3'-phosphate
antctgtgacagtagcaaagc

SEQ ID NO: 1063 - RNA, 19 nt, synthetic construct
  source 1..19: mol_type = other RNA
actgtcacagactccactt

SEQ ID NO: 1064 - RNA, 21 nt, synthetic construct
  source 1..21: mol_type = other RNA
  modified_base 3: mod_base = OTHER; note = 2'-hypoxanthine-3'-phosphate
aantggagtctgtgacagtag

SEQ ID NO: 1065 - RNA, 19 nt, synthetic construct
  source 1..19: mol_type = other RNA
acccttcctggcactcttt

SEQ ID NO: 1066 - RNA, 21 nt, synthetic construct
  source 1..21: mol_type = other RNA
  modified_base 4: mod_base = OTHER; note = 2'-hypoxanthine-3'-phosphate
aaanagtgccaggaagggtgg

SEQ ID NO: 1067 - RNA, 19 nt, synthetic construct
  source 1..19: mol_type = other RNA
cttcctggcactctttgct

SEQ ID NO: 1068 - RNA, 21 nt, synthetic construct
  source 1..21: mol_type = other RNA
  modified_base 2: mod_base = OTHER; note = 2'-hypoxanthine-3'-phosphate
ancaaagagtgccaggaaggg

SEQ ID NO: 1069 - RNA, 19 nt, synthetic construct
  source 1..19: mol_type = other RNA
actctttgcttgaggatct

SEQ ID NO: 1070 - RNA, 21 nt, synthetic construct
  source 1..21: mol_type = other RNA
  modified_base 2: mod_base = OTHER; note = 2'-hypoxanthine-3'-phosphate
anatcctcaagcaaagagtgc

SEQ ID NO: 1071 - RNA, 19 nt, synthetic construct
  source 1..19: mol_type = other RNA
ctctttgcttgaggatctt

SEQ ID NO: 1072 - RNA, 21 nt, synthetic construct
  source 1..21: mol_type = other RNA
  modified_base 3: mod_base = OTHER; note = 2'-hypoxanthine-3'-phosphate
aanatcctcaagcaaagagtg

SEQ ID NO: 1073 - RNA, 19 nt, synthetic construct
  source 1..19: mol_type = other RNA
gctggcataccttaactct

SEQ ID NO: 1074 - RNA, 21 nt, synthetic construct
  source 1..21: mol_type = other RNA
  modified_base 2: mod_base = OTHER; note = 2'-hypoxanthine-3'-phosphate
anagttaaggtatgccagccc

SEQ ID NO: 1075 - RNA, 19 nt, synthetic construct
  source 1..19: mol_type = other RNA
cttgaggggtgagaagtct

SEQ ID NO: 1076 - RNA, 21 nt, synthetic construct
  source 1..21: mol_type = other RNA
  modified_base 2: mod_base = OTHER; note = 2'-hypoxanthine-3'-phosphate
anacttctcacccctcaagcc

SEQ ID NO: 1077 - RNA, 19 nt, synthetic construct
  source 1..19: mol_type = other RNA
agtctggtgtcctgaaact

SEQ ID NO: 1078 - RNA, 21 nt, synthetic construct
  source 1..21: mol_type = other RNA
  modified_base 2: mod_base = OTHER; note = 2'-hypoxanthine-3'-phosphate
antttcaggacaccagacttc

SEQ ID NO: 1079 - RNA, 19 nt, synthetic construct
  source 1..19: mol_type = other RNA
ctggtgtcctgaaactgca

SEQ ID NO: 1080 - RNA, 21 nt, synthetic construct
  source 1..21: mol_type = other RNA
  modified_base 2: mod_base = OTHER; note = 2'-hypoxanthine-3'-phosphate
tncagtttcaggacaccagac

SEQ ID NO: 1081 - RNA, 19 nt, synthetic construct
  source 1..19: mol_type = other RNA
gtgtcctgaaactgcaact

SEQ ID NO: 1082 - RNA, 21 nt, synthetic construct
  source 1..21: mol_type = other RNA
  modified_base 2: mod_base = OTHER; note = 2'-hypoxanthine-3'-phosphate
anttgcagtttcaggacacca

SEQ ID NO: 1083 - RNA, 19 nt, synthetic construct
  source 1..19: mol_type = other RNA
tgtcctgaaactgcaacta

SEQ ID NO: 1084 - RNA, 21 nt, synthetic construct
  source 1..21: mol_type = other RNA
  modified_base 3: mod_base = OTHER; note = 2'-hypoxanthine-3'-phosphate
tanttgcagtttcaggacacc

SEQ ID NO: 1085 - RNA, 19 nt, synthetic construct
  source 1..19: mol_type = other RNA
gtcctgaaactgcaactag

SEQ ID NO: 1086 - RNA, 21 nt, synthetic construct
  source 1..21: mol_type = other RNA
  modified_base 4: mod_base = OTHER; note = 2'-hypoxanthine-3'-phosphate
ctanttgcagtttcaggacac

SEQ ID NO: 1087 - RNA, 19 nt, synthetic construct
  source 1..19: mol_type = other RNA
agaaggcaacagcacagtt

SEQ ID NO: 1088 - RNA, 21 nt, synthetic construct
  source 1..21: mol_type = other RNA
  modified_base 5: mod_base = OTHER; note = 2'-hypoxanthine-3'-phosphate
aactntgctgttgccttctag

SEQ ID NO: 1089 - RNA, 19 nt, synthetic construct
  source 1..19: mol_type = other RNA
aggcaacagcacagttact

SEQ ID NO: 1090 - RNA, 21 nt, synthetic construct
  source 1..21: mol_type = other RNA
  modified_base 2: mod_base = OTHER; note = 2'-hypoxanthine-3'-phosphate
antaactgtgctgttgccttc

SEQ ID NO: 1091 - RNA, 19 nt, synthetic construct
  source 1..19: mol_type = other RNA
ccttcctagagcttaagat

SEQ ID NO: 1092 - RNA, 21 nt, synthetic construct
  source 1..21: mol_type = other RNA
  modified_base 8: mod_base = OTHER; note = 2'-hypoxanthine-3'-phosphate
atcttaanctctaggaagggc

SEQ ID NO: 1093 - RNA, 19 nt, synthetic construct
  source 1..19: mol_type = other RNA
agagcttaagatccgagcc

SEQ ID NO: 1094 - RNA, 21 nt, synthetic construct
  source 1..21: mol_type = other RNA
  modified_base 2: mod_base = OTHER; note = 2'-hypoxanthine-3'-phosphate
gnctcggatcttaagctctag

SEQ ID NO: 1095 - RNA, 19 nt, synthetic construct
  source 1..19: mol_type = other RNA
gagcttaagatccgagcca

SEQ ID NO: 1096 - RNA, 21 nt, synthetic construct
  source 1..21: mol_type = other RNA
  modified_base 2: mod_base = OTHER; note = 2'-hypoxanthine-3'-phosphate
tngctcggatcttaagctcta

SEQ ID NO: 1097 - RNA, 19 nt, synthetic construct
  source 1..19: mol_type = other RNA
gcttaagatccgagccaat

SEQ ID NO: 1098 - RNA, 21 nt, synthetic construct
  source 1..21: mol_type = other RNA
  modified_base 4: mod_base = OTHER; note = 2'-hypoxanthine-3'-phosphate
attngctcggatcttaagctc

SEQ ID NO: 1099 - RNA, 19 nt, synthetic construct
  source 1..19: mol_type = other RNA
cctgcgacccccttatgtt

SEQ ID NO: 1100 - RNA, 21 nt, synthetic construct
  source 1..21: mol_type = other RNA
  modified_base 8: mod_base = OTHER; note = 2'-hypoxanthine-3'-phosphate
aacataanggggtcgcaggct

SEQ ID NO: 1101 - RNA, 19 nt, synthetic construct
  source 1..19: mol_type = other RNA
tgttgcaggcgagaccatt

SEQ ID NO: 1102 - RNA, 21 nt, synthetic construct
  source 1..21: mol_type = other RNA
  modified_base 4: mod_base = OTHER; note = 2'-hypoxanthine-3'-phosphate
aatngtctcgcctgcaacata

SEQ ID NO: 1103 - RNA, 19 nt, synthetic construct
  source 1..19: mol_type = other RNA
cgagaccattacgtagact

SEQ ID NO: 1104 - RNA, 21 nt, synthetic construct
  source 1..21: mol_type = other RNA
  modified_base 2: mod_base = OTHER; note = 2'-hypoxanthine-3'-phosphate
antctacgtaatggtctcgcc

SEQ ID NO: 1105 - RNA, 19 nt, synthetic construct
  source 1..19: mol_type = other RNA
gagaccattacgtagactt

SEQ ID NO: 1106 - RNA, 21 nt, synthetic construct
  source 1..21: mol_type = other RNA
  modified_base 3: mod_base = OTHER; note = 2'-hypoxanthine-3'-phosphate
aantctacgtaatggtctcgc

SEQ ID NO: 1107 - RNA, 19 nt, synthetic construct
  source 1..19: mol_type = other RNA
attacgtagacttccagga

SEQ ID NO: 1108 - RNA, 21 nt, synthetic construct
  source 1..21: mol_type = other RNA
  modified_base 5: mod_base = OTHER; note = 2'-hypoxanthine-3'-phosphate
tcctngaagtctacgtaatgg

SEQ ID NO: 1109 - RNA, 19 nt, synthetic construct
  source 1..19: mol_type = other RNA
aggggtaccagctgaatta

SEQ ID NO: 1110 - RNA, 21 nt, synthetic construct
  source 1..21: mol_type = other RNA
  modified_base 8: mod_base = OTHER; note = 2'-hypoxanthine-3'-phosphate
taattcanctggtacccctcg

SEQ ID NO: 1111 - RNA, 19 nt, synthetic construct
  source 1..19: mol_type = other RNA
attgctgcctctttccatt

SEQ ID NO: 1112 - RNA, 21 nt, synthetic construct
  source 1..21: mol_type = other RNA
  modified_base 4: mod_base = OTHER; note = 2'-hypoxanthine-3'-phosphate
aatngaaagaggcagcaatgc

SEQ ID NO: 1113 - RNA, 19 nt, synthetic construct
  source 1..19: mol_type = other RNA
ctttccattctgccgtctt

SEQ ID NO: 1114 - RNA, 21 nt, synthetic construct
  source 1..21: mol_type = other RNA
  modified_base 3: mod_base = OTHER; note = 2'-hypoxanthine-3'-phosphate
aanacggcagaatggaaagag

SEQ ID NO: 1115 - RNA, 19 nt, synthetic construct
  source 1..19: mol_type = other RNA
cctcctcaaagccaacaat

SEQ ID NO: 1116 - RNA, 21 nt, synthetic construct
  source 1..21: mol_type = other RNA
  modified_base 4: mod_base = OTHER; note = 2'-hypoxanthine-3'-phosphate
attnttggctttgaggaggct

SEQ ID NO: 1117 - RNA, 19 nt, synthetic construct
  source 1..19: mol_type = other RNA
cctcaaagccaacaatcct

SEQ ID NO: 1118 - RNA, 21 nt, synthetic construct
  source 1..21: mol_type = other RNA
  modified_base 2: mod_base = OTHER; note = 2'-hypoxanthine-3'-phosphate
angattgttggctttgaggag

SEQ ID NO: 1119 - RNA, 19 nt, synthetic construct
  source 1..19: mol_type = other RNA
ctcaaagccaacaatcctt

SEQ ID NO: 1120 - RNA, 21 nt, synthetic construct
  source 1..21: mol_type = other RNA
  modified_base 3: mod_base = OTHER; note = 2'-hypoxanthine-3'-phosphate
aangattgttggctttgagga

SEQ ID NO: 1121 - RNA, 19 nt, synthetic construct
  source 1..19: mol_type = other RNA
cctgccagtacctcctgtt

SEQ ID NO: 1122 - RNA, 21 nt, synthetic construct
  source 1..21: mol_type = other RNA
  modified_base 5: mod_base = OTHER; note = 2'-hypoxanthine-3'-phosphate
aacangaggtactggcaggcc

SEQ ID NO: 1123 - RNA, 19 nt, synthetic construct
  source 1..19: mol_type = other RNA
tctcctctacctggatcat

SEQ ID NO: 1124 - RNA, 21 nt, synthetic construct
  source 1..21: mol_type = other RNA
  modified_base 3: mod_base = OTHER; note = 2'-hypoxanthine-3'-phosphate
atnatccaggtagaggagaga

SEQ ID NO: 1125 - RNA, 19 nt, synthetic construct
  source 1..19: mol_type = other RNA
ctcctctacctggatcata

SEQ ID NO: 1126 - RNA, 21 nt, synthetic construct
  source 1..21: mol_type = other RNA
  modified_base 4: mod_base = OTHER; note = 2'-hypoxanthine-3'-phosphate
tatnatccaggtagaggagag

SEQ ID NO: 1127 - RNA, 19 nt, synthetic construct
  source 1..19: mol_type = other RNA
tcctctacctggatcataa

SEQ ID NO: 1128 - RNA, 21 nt, synthetic construct
  source 1..21: mol_type = other RNA
  modified_base 5: mod_base = OTHER; note = 2'-hypoxanthine-3'-phosphate
ttatnatccaggtagaggaga

SEQ ID NO: 1129 - RNA, 19 nt, synthetic construct
  source 1..19: mol_type = other RNA
cctctacctggatcataat

SEQ ID NO: 1130 - RNA, 21 nt, synthetic construct
  source 1..21: mol_type = other RNA
  modified_base 6: mod_base = OTHER; note = 2'-hypoxanthine-3'-phosphate
attatnatccaggtagaggag

SEQ ID NO: 1131 - RNA, 19 nt, synthetic construct
  source 1..19: mol_type = other RNA
cctggatcataatggcaat

SEQ ID NO: 1132 - RNA, 21 nt, synthetic construct
  source 1..21: mol_type = other RNA
  modified_base 4: mod_base = OTHER; note = 2'-hypoxanthine-3'-phosphate
attnccattatgatccaggta

SEQ ID NO: 1133 - RNA, 19 nt, synthetic construct
  source 1..19: mol_type = other RNA
tggatcataatggcaatgt

SEQ ID NO: 1134 - RNA, 21 nt, synthetic construct
  source 1..21: mol_type = other RNA
  modified_base 6: mod_base = OTHER; note = 2'-hypoxanthine-3'-phosphate
acattnccattatgatccagg

SEQ ID NO: 1135 - RNA, 19 nt, synthetic construct
  source 1..19: mol_type = other RNA
ataatggcaatgtggtcaa

SEQ ID NO: 1136 - RNA, 21 nt, synthetic construct
  source 1..21: mol_type = other RNA
  modified_base 3: mod_base = OTHER; note = 2'-hypoxanthine-3'-phosphate
ttnaccacattgccattatga

SEQ ID NO: 1137 - RNA, 19 nt, synthetic construct
  source 1..19: mol_type = other RNA
atgtggtcaagacggatgt

SEQ ID NO: 1138 - RNA, 21 nt, synthetic construct
  source 1..21: mol_type = other RNA
  modified_base 7: mod_base = OTHER; note = 2'-hypoxanthine-3'-phosphate
acatccntcttgaccacattg

SEQ ID NO: 1139 - RNA, 19 nt, synthetic construct
  source 1..19: mol_type = other RNA
agacggatgtgccagatat

SEQ ID NO: 1140 - RNA, 21 nt, synthetic construct
  source 1..21: mol_type = other RNA
  modified_base 7: mod_base = OTHER; note = 2'-hypoxanthine-3'-phosphate
atatctngcacatccgtcttg

SEQ ID NO: 1141 - RNA, 19 nt, synthetic construct
  source 1..19: mol_type = other RNA
tttggagtgaagagaccaa

SEQ ID NO: 1142 - RNA, 21 nt, synthetic construct
  source 1..21: mol_type = other RNA
  modified_base 3: mod_base = OTHER; note = 2'-hypoxanthine-3'-phosphate
ttngtctcttcactccaaagc

SEQ ID NO: 1143 - RNA, 19 nt, synthetic construct
  source 1..19: mol_type = other RNA
agtgaagagaccaagatga

SEQ ID NO: 1144 - RNA, 21 nt, synthetic construct
  source 1..21: mol_type = other RNA
  modified_base 8: mod_base = OTHER; note = 2'-hypoxanthine-3'-phosphate
tcatcttngtctcttcactcc

SEQ ID NO: 1145 - RNA, 19 nt, synthetic construct
  source 1..19: mol_type = other RNA
tgactggaggcatcagatt

SEQ ID NO: 1146 - RNA, 21 nt, synthetic construct
  source 1..21: mol_type = other RNA
  modified_base 6: mod_base = OTHER; note = 2'-hypoxanthine-3'-phosphate
aatctnatgcctccagtcaca

SEQ ID NO: 1147 - RNA, 19 nt, synthetic construct
  source 1..19: mol_type = other RNA
aacaaccacctggcaatat

SEQ ID NO: 1148 - RNA, 21 nt, synthetic construct
  source 1..21: mol_type = other RNA
  modified_base 6: mod_base = OTHER; note = 2'-hypoxanthine-3'-phosphate
atattnccaggtggttgttgg

SEQ ID NO: 1149 - RNA, 19 nt, synthetic construct
  source 1..19: mol_type = other RNA
ccacctggcaatatgactc

SEQ ID NO: 1150 - RNA, 21 nt, synthetic construct
  source 1..21: mol_type = other RNA
  modified_base 3: mod_base = OTHER; note = 2'-hypoxanthine-3'-phosphate
gantcatattgccaggtggtt

SEQ ID NO: 1151 - RNA, 19 nt, synthetic construct
  source 1..19: mol_type = other RNA
cctggcaatatgactcact

SEQ ID NO: 1152 - RNA, 21 nt, synthetic construct
  source 1..21: mol_type = other RNA
  modified_base 2: mod_base = OTHER; note = 2'-hypoxanthine-3'-phosphate
antgagtcatattgccaggtg

SEQ ID NO: 1153 - RNA, 19 nt, synthetic construct
  source 1..19: mol_type = other RNA
ctggcaatatgactcactt

SEQ ID NO: 1154 - RNA, 21 nt, synthetic construct
  source 1..21: mol_type = other RNA
  modified_base 3: mod_base = OTHER; note = 2'-hypoxanthine-3'-phosphate
aantgagtcatattgccaggt

SEQ ID NO: 1155 - RNA, 19 nt, synthetic construct
  source 1..19: mol_type = other RNA
caaatgggcactttcttgt

SEQ ID NO: 1156 - RNA, 21 nt, synthetic construct
  source 1..21: mol_type = other RNA
  modified_base 5: mod_base = OTHER; note = 2'-hypoxanthine-3'-phosphate
acaanaaagtgcccatttggg

SEQ ID NO: 1157 - RNA, 19 nt, synthetic construct
  source 1..19: mol_type = other RNA
aatgggcactttcttgtct

SEQ ID NO: 1158 - RNA, 21 nt, synthetic construct
  source 1..21: mol_type = other RNA
  modified_base 2: mod_base = OTHER; note = 2'-hypoxanthine-3'-phosphate
anacaagaaagtgcccatttg

SEQ ID NO: 1159 - RNA, 19 nt, synthetic construct
  source 1..19: mol_type = other RNA
cactttcttgtctgagact

SEQ ID NO: 1160 - RNA, 21 nt, synthetic construct
  source 1..21: mol_type = other RNA
  modified_base 2: mod_base = OTHER; note = 2'-hypoxanthine-3'-phosphate
antctcagacaagaaagtgcc

SEQ ID NO: 1161 - RNA, 19 nt, synthetic construct
  source 1..19: mol_type = other RNA
actttcttgtctgagactc

SEQ ID NO: 1162 - RNA, 21 nt, synthetic construct
  source 1..21: mol_type = other RNA
  modified_base 3: mod_base = OTHER; note = 2'-hypoxanthine-3'-phosphate
gantctcagacaagaaagtgc

SEQ ID NO: 1163 - RNA, 19 nt, synthetic construct
  source 1..19: mol_type = other RNA
ctttcttgtctgagactct

SEQ ID NO: 1164 - RNA, 21 nt, synthetic construct
  source 1..21: mol_type = other RNA
  modified_base 2: mod_base = OTHER; note = 2'-hypoxanthine-3'-phosphate
anagtctcagacaagaaagtg

SEQ ID NO: 1165 - RNA, 19 nt, synthetic construct
  source 1..19: mol_type = other RNA
tgtctgagactctggctta

SEQ ID NO: 1166 - RNA, 21 nt, synthetic construct
  source 1..21: mol_type = other RNA
  modified_base 4: mod_base = OTHER; note = 2'-hypoxanthine-3'-phosphate
taanccagagtctcagacaag

SEQ ID NO: 1167 - RNA, 19 nt, synthetic construct
  source 1..19: mol_type = other RNA
tctgagactctggcttatt

SEQ ID NO: 1168 - RNA, 21 nt, synthetic construct
  source 1..21: mol_type = other RNA
  modified_base 6: mod_base = OTHER; note = 2'-hypoxanthine-3'-phosphate
aataanccagagtctcagaca

SEQ ID NO: 1169 - RNA, 19 nt, synthetic construct
  source 1..19: mol_type = other RNA
ttattccaggttggctgat

SEQ ID NO: 1170 - RNA, 21 nt, synthetic construct
  source 1..21: mol_type = other RNA
  modified_base 5: mod_base = OTHER; note = 2'-hypoxanthine-3'-phosphate
atcanccaacctggaataagc

SEQ ID NO: 1171 - RNA, 19 nt, synthetic construct
  source 1..19: mol_type = other RNA
gggagatgggtaaagcgtt

SEQ ID NO: 1172 - RNA, 21 nt, synthetic construct
  source 1..21: mol_type = other RNA
  modified_base 4: mod_base = OTHER; note = 2'-hypoxanthine-3'-phosphate
aacnctttacccatctcccaa

SEQ ID NO: 1173 - RNA, 19 nt, synthetic construct
  source 1..19: mol_type = other RNA
ggagatgggtaaagcgttt

SEQ ID NO: 1174 - RNA, 21 nt, synthetic construct
  source 1..21: mol_type = other RNA
  modified_base 5: mod_base = OTHER; note = 2'-hypoxanthine-3'-phosphate
aaacnctttacccatctccca

SEQ ID NO: 1175 - RNA, 19 nt, synthetic construct
  source 1..19: mol_type = other RNA
gggtaaagcgtttcttcta

SEQ ID NO: 1176 - RNA, 21 nt, synthetic construct
  source 1..21: mol_type = other RNA
  modified_base 3: mod_base = OTHER; note = 2'-hypoxanthine-3'-phosphate
tanaagaaacgctttacccat

SEQ ID NO: 1177 - RNA, 19 nt, synthetic construct
  source 1..19: mol_type = other RNA
ggtaaagcgtttcttctaa

SEQ ID NO: 1178 - RNA, 21 nt, synthetic construct
  source 1..21: mol_type = other RNA
  modified_base 4: mod_base = OTHER; note = 2'-hypoxanthine-3'-phosphate
ttanaagaaacgctttaccca

SEQ ID NO: 1179 - RNA, 19 nt, synthetic construct
  source 1..19: mol_type = other RNA
gtaaagcgtttcttctaaa

SEQ ID NO: 1180 - RNA, 21 nt, synthetic construct
  source 1..21: mol_type = other RNA
  modified_base 5: mod_base = OTHER; note = 2'-hypoxanthine-3'-phosphate
tttanaagaaacgctttaccc

SEQ ID NO: 1181 - RNA, 19 nt, synthetic construct
  source 1..19: mol_type = other RNA
taaagcgtttcttctaaag

SEQ ID NO: 1182 - RNA, 21 nt, synthetic construct
  source 1..21: mol_type = other RNA
  modified_base 6: mod_base = OTHER; note = 2'-hypoxanthine-3'-phosphate
ctttanaagaaacgctttacc

SEQ ID NO: 1183 - RNA, 19 nt, synthetic construct
  source 1..19: mol_type = other RNA
gtttcttctaaaggggtct

SEQ ID NO: 1184 - RNA, 21 nt, synthetic construct
  source 1..21: mol_type = other RNA
  modified_base 2: mod_base = OTHER; note = 2'-hypoxanthine-3'-phosphate
anacccctttagaagaaacgc

SEQ ID NO: 1185 - RNA, 19 nt, synthetic construct
  source 1..19: mol_type = other RNA
tttcttctaaaggggtcta

SEQ ID NO: 1186 - RNA, 21 nt, synthetic construct
  source 1..21: mol_type = other RNA
  modified_base 3: mod_base = OTHER; note = 2'-hypoxanthine-3'-phosphate
tanacccctttagaagaaacg

SEQ ID NO: 1187 - RNA, 19 nt, synthetic construct
  source 1..19: mol_type = other RNA
ggtctacccagaaagcatg

SEQ ID NO: 1188 - RNA, 21 nt, synthetic construct
  source 1..21: mol_type = other RNA
  modified_base 4: mod_base = OTHER; note = 2'-hypoxanthine-3'-phosphate
catnctttctgggtagacccc

SEQ ID NO: 1189 - RNA, 19 nt, synthetic construct
  source 1..19: mol_type = other RNA
tctacccagaaagcatgat

SEQ ID NO: 1190 - RNA, 21 nt, synthetic construct
  source 1..21: mol_type = other RNA
  modified_base 6: mod_base = OTHER; note = 2'-hypoxanthine-3'-phosphate
atcatnctttctgggtagacc

SEQ ID NO: 1191 - RNA, 19 nt, synthetic construct
  source 1..19: mol_type = other RNA
ctacccagaaagcatgatt

SEQ ID NO: 1192 - RNA, 21 nt, synthetic construct
  source 1..21: mol_type = other RNA
  modified_base 7: mod_base = OTHER; note = 2'-hypoxanthine-3'-phosphate
aatcatnctttctgggtagac

SEQ ID NO: 1193 - RNA, 19 nt, synthetic construct
  source 1..19: mol_type = other RNA
tacccagaaagcatgattt

SEQ ID NO: 1194 - RNA, 21 nt, synthetic construct
  source 1..21: mol_type = other RNA
  modified_base 8: mod_base = OTHER; note = 2'-hypoxanthine-3'-phosphate
aaatcatnctttctgggtaga

SEQ ID NO: 1195 - RNA, 19 nt, synthetic construct
  source 1..19: mol_type = other RNA
ccagaaagcatgatttcct

SEQ ID NO: 1196 - RNA, 21 nt, synthetic construct
  source 1..21: mol_type = other RNA
  modified_base 2: mod_base = OTHER; note = 2'-hypoxanthine-3'-phosphate
angaaatcatgctttctgggt

SEQ ID NO: 1197 - RNA, 19 nt, synthetic construct
  source 1..19: mol_type = other RNA
aagcatgatttcctgccct

SEQ ID NO: 1198 - RNA, 21 nt, synthetic construct
  source 1..21: mol_type = other RNA
  modified_base 2: mod_base = OTHER; note = 2'-hypoxanthine-3'-phosphate
anggcaggaaatcatgctttc

SEQ ID NO: 1199 - RNA, 19 nt, synthetic construct
  source 1..19: mol_type = other RNA
atgatttcctgccctaagt

SEQ ID NO: 1200 - RNA, 21 nt, synthetic construct
  source 1..21: mol_type = other RNA
  modified_base 6: mod_base = OTHER; note = 2'-hypoxanthine-3'-phosphate
acttanggcaggaaatcatgc

SEQ ID NO: 1201 - RNA, 19 nt, synthetic construct
  source 1..19: mol_type = other RNA
aaggcagagaaaaattact

SEQ ID NO: 1202 - RNA, 21 nt, synthetic construct
  source 1..21: mol_type = other RNA
  modified_base 2: mod_base = OTHER; note = 2'-hypoxanthine-3'-phosphate
antaatttttctctgccttcc

SEQ ID NO: 1203 - RNA, 19 nt, synthetic construct
  source 1..19: mol_type = other RNA
aggcagagaaaaattactt

SEQ ID NO: 1204 - RNA, 21 nt, synthetic construct
  source 1..21: mol_type = other RNA
  modified_base 3: mod_base = OTHER; note = 2'-hypoxanthine-3'-phosphate
aantaatttttctctgccttc

SEQ ID NO: 1205 - RNA, 19 nt, synthetic construct
  source 1..19: mol_type = other RNA
ggaggaggaagcagataga

SEQ ID NO: 1206 - RNA, 21 nt, synthetic construct
  source 1..21: mol_type = other RNA
  modified_base 8: mod_base = OTHER; note = 2'-hypoxanthine-3'-phosphate
tctatctncttcctcctcccc

SEQ ID NO: 1207 - RNA, 19 nt, synthetic construct
  source 1..19: mol_type = other RNA
agggctgttgaggtacctt

SEQ ID NO: 1208 - RNA, 21 nt, synthetic construct
  source 1..21: mol_type = other RNA
  modified_base 3: mod_base = OTHER; note = 2'-hypoxanthine-3'-phosphate
aangtacctcaacagccctta

SEQ ID NO: 1209 - RNA, 19 nt, synthetic construct
  source 1..19: mol_type = other RNA
ggctgttgaggtaccttaa

SEQ ID NO: 1210 - RNA, 21 nt, synthetic construct
  source 1..21: mol_type = other RNA
  modified_base 5: mod_base = OTHER; note = 2'-hypoxanthine-3'-phosphate
ttaangtacctcaacagccct

SEQ ID NO: 1211 - RNA, 19 nt, synthetic construct
  source 1..19: mol_type = other RNA
gaaacaggagtcaggaaaa

SEQ ID NO: 1212 - RNA, 21 nt, synthetic construct
  source 1..21: mol_type = other RNA
  modified_base 8: mod_base = OTHER; note = 2'-hypoxanthine-3'-phosphate
ttttcctnactcctgtttctg

SEQ ID NO: 1213 - RNA, 19 nt, synthetic construct
  source 1..19: mol_type = other RNA
gtcaggaaaatgaggcact

SEQ ID NO: 1214 - RNA, 21 nt, synthetic construct
  source 1..21: mol_type = other RNA
  modified_base 2: mod_base = OTHER; note = 2'-hypoxanthine-3'-phosphate
antgcctcattttcctgactc

SEQ ID NO: 1215 - RNA, 19 nt, synthetic construct
  source 1..19: mol_type = other RNA
taagaagttccctggtttt

SEQ ID NO: 1216 - RNA, 19 nt, synthetic construct
  source 1..19: mol_type = other RNA
  modified_base 8: mod_base = OTHER; note = 2'-hypoxanthine-3'-phosphate
aaaaccanggaacttctta

SEQ ID NO: 1217 - RNA, 19 nt, synthetic construct
  source 1..19: mol_type = other RNA
cactgggagacaagcattt

SEQ ID NO: 1218 - RNA, 19 nt, synthetic construct
  source 1..19: mol_type = other RNA
  modified_base 5: mod_base = OTHER; note = 2'-hypoxanthine-3'-phosphate
aaatncttgtctcccagtg

SEQ ID NO: 1219 - RNA, 19 nt, synthetic construct
  source 1..19: mol_type = other RNA
actgggagacaagcattta

SEQ ID NO: 1220 - RNA, 19 nt, synthetic construct
  source 1..19: mol_type = other RNA
  modified_base 6: mod_base = OTHER; note = 2'-hypoxanthine-3'-phosphate
taaatncttgtctcccagt

SEQ ID NO: 1221 - RNA, 19 nt, synthetic construct
  source 1..19: mol_type = other RNA
ctgggagacaagcatttat

SEQ ID NO: 1222 - RNA, 19 nt, synthetic construct
  source 1..19: mol_type = other RNA
  modified_base 7: mod_base = OTHER; note = 2'-hypoxanthine-3'-phosphate
ataaatncttgtctcccag

SEQ ID NO: 1223 - RNA, 19 nt, synthetic construct
  source 1..19: mol_type = other RNA
tgggagacaagcatttata

SEQ ID NO: 1224 - RNA, 19 nt, synthetic construct
  source 1..19: mol_type = other RNA
  modified_base 8: mod_base = OTHER; note = 2'-hypoxanthine-3'-phosphate
tataaatncttgtctccca

SEQ ID NO: 1225 - RNA, 19 nt, synthetic construct
  source 1..19: mol_type = other RNA
ggagacaagcatttatact

SEQ ID NO: 1226 - RNA, 19 nt, synthetic construct
  source 1..19: mol_type = other RNA
  modified_base 2: mod_base = OTHER; note = 2'-hypoxanthine-3'-phosphate
antataaatgcttgtctcc

SEQ ID NO: 1227 - RNA, 19 nt, synthetic construct
  source 1..19: mol_type = other RNA
gagacaagcatttatactt

SEQ ID NO: 1228 - RNA, 19 nt, synthetic construct
  source 1..19: mol_type = other RNA
  modified_base 3: mod_base = OTHER; note = 2'-hypoxanthine-3'-phosphate
aantataaatgcttgtctc

SEQ ID NO: 1229 - RNA, 19 nt, synthetic construct
  source 1..19: mol_type = other RNA
agacaagcatttatacttt

SEQ ID NO: 1230 - RNA, 19 nt, synthetic construct
  source 1..19: mol_type = other RNA
  modified_base 4: mod_base = OTHER; note = 2'-hypoxanthine-3'-phosphate
aaantataaatgcttgtct

SEQ ID NO: 1231 - RNA, 19 nt, synthetic construct
  source 1..19: mol_type = other RNA
acaagcatttatactttct

SEQ ID NO: 1232 - RNA, 19 nt, synthetic construct
  source 1..19: mol_type = other RNA
  modified_base 2: mod_base = OTHER; note = 2'-hypoxanthine-3'-phosphate
anaaagtataaatgcttgt

SEQ ID NO: 1233 - RNA, 19 nt, synthetic construct
  source 1..19: mol_type = other RNA
caagcatttatactttctt

SEQ ID NO: 1234 - RNA, 19 nt, synthetic construct
  source 1..19: mol_type = other RNA
  modified_base 3: mod_base = OTHER; note = 2'-hypoxanthine-3'-phosphate
aanaaagtataaatgcttg

SEQ ID NO: 1235 - RNA, 19 nt, synthetic construct
  source 1..19: mol_type = other RNA
gcatttatactttctttct

SEQ ID NO: 1236 - RNA, 19 nt, synthetic construct
  source 1..19: mol_type = other RNA
  modified_base 2: mod_base = OTHER; note = 2'-hypoxanthine-3'-phosphate
anaaagaaagtataaatgc

SEQ ID NO: 1237 - RNA, 19 nt, synthetic construct
  source 1..19: mol_type = other RNA
catttatactttctttctt

SEQ ID NO: 1238 - RNA, 19 nt, synthetic construct
  source 1..19: mol_type = other RNA
  modified_base 3: mod_base = OTHER; note = 2'-hypoxanthine-3'-phosphate
aanaaagaaagtataaatg

SEQ ID NO: 1239 - RNA, 19 nt, synthetic construct
  source 1..19: mol_type = other RNA
ggagaaagaaaatcaacaa

SEQ ID NO: 1240 - RNA, 19 nt, synthetic construct
  source 1..19: mol_type = other RNA
  modified_base 3: mod_base = OTHER; note = 2'-hypoxanthine-3'-phosphate
ttnttgattttctttctcc

SEQ ID NO: 1241 - RNA, 19 nt, synthetic construct
  source 1..19: mol_type = other RNA
agaaagaaaatcaacaaat

SEQ ID NO: 1242 - RNA, 19 nt, synthetic construct
  source 1..19: mol_type = other RNA
  modified_base 5: mod_base = OTHER; note = 2'-hypoxanthine-3'-phosphate
atttnttgattttctttct

SEQ ID NO: 1243 - RNA, 19 nt, synthetic construct
  source 1..19: mol_type = other RNA
tcaacaaatgtgagtcata

SEQ ID NO: 1244 - RNA, 19 nt, synthetic construct
  source 1..19: mol_type = other RNA
  modified_base 4: mod_base = OTHER; note = 2'-hypoxanthine-3'-phosphate
tatnactcacatttgttga

SEQ ID NO: 1245 - RNA, 19 nt, synthetic construct
  source 1..19: mol_type = other RNA
caacaaatgtgagtcataa

SEQ ID NO: 1246 - RNA, 19 nt, synthetic construct
  source 1..19: mol_type = other RNA
  modified_base 5: mod_base = OTHER; note = 2'-hypoxanthine-3'-phosphate
ttatnactcacatttgttg

SEQ ID NO: 1247 - RNA, 19 nt, synthetic construct
  source 1..19: mol_type = other RNA
caaatgtgagtcataaaga

SEQ ID NO: 1248 - RNA, 19 nt, synthetic construct
  source 1..19: mol_type = other RNA
  modified_base 8: mod_base = OTHER; note = 2'-hypoxanthine-3'-phosphate
tctttatnactcacatttg

SEQ ID NO: 1249 - RNA, 19 nt, synthetic construct
  source 1..19: mol_type = other RNA
atggtccagagcaacagtt

SEQ ID NO: 1250 - RNA, 19 nt, synthetic construct
  source 1..19: mol_type = other RNA
  modified_base 5: mod_base = OTHER; note = 2'-hypoxanthine-3'-phosphate
aactnttgctctggaccat

SEQ ID NO: 1251 - RNA, 19 nt, synthetic construct
  source 1..19: mol_type = other RNA
gtccagagcaacagttctt

SEQ ID NO: 1252 - RNA, 19 nt, synthetic construct
  source 1..19: mol_type = other RNA
  modified_base 3: mod_base = OTHER; note = 2'-hypoxanthine-3'-phosphate
aanaactgttgctctggac

SEQ ID NO: 1253 - RNA, 19 nt, synthetic construct
  source 1..19: mol_type = other RNA
cagagcaacagttcttcaa

SEQ ID NO: 1254 - RNA, 19 nt, synthetic construct
  source 1..19: mol_type = other RNA
  modified_base 3: mod_base = OTHER; note = 2'-hypoxanthine-3'-phosphate
ttnaagaactgttgctctg

SEQ ID NO: 1255 - RNA, 19 nt, synthetic construct
  source 1..19: mol_type = other RNA
gagcaacagttcttcaagt

SEQ ID NO: 1256 - RNA, 19 nt, synthetic construct
  source 1..19: mol_type = other RNA
  modified_base 5: mod_base = OTHER; note = 2'-hypoxanthine-3'-phosphate
acttnaagaactgttgctc

SEQ ID NO: 1257 - RNA, 19 nt, synthetic construct
  source 1..19: mol_type = other RNA
acagttcttcaagtgtact

SEQ ID NO: 1258 - RNA, 19 nt, synthetic construct
  source 1..19: mol_type = other RNA
  modified_base 2: mod_base = OTHER; note = 2'-hypoxanthine-3'-phosphate
antacacttgaagaactgt

SEQ ID NO: 1259 - RNA, 19 nt, synthetic construct
  source 1..19: mol_type = other RNA
gtgtactctgtaggcttct

SEQ ID NO: 1260 - RNA, 19 nt, synthetic construct
  source 1..19: mol_type = other RNA
  modified_base 2: mod_base = OTHER; note = 2'-hypoxanthine-3'-phosphate
anaagcctacagagtacac

SEQ ID NO: 1261 - RNA, 19 nt, synthetic construct
  source 1..19: mol_type = other RNA
gcttctgggaggtcccttt

SEQ ID NO: 1262 - RNA, 19 nt, synthetic construct
  source 1..19: mol_type = other RNA
  modified_base 4: mod_base = OTHER; note = 2'-hypoxanthine-3'-phosphate
aaanggacctcccagaagc

SEQ ID NO: 1263 - RNA, 19 nt, synthetic construct
  source 1..19: mol_type = other RNA
tcaggggtgtccacaaagt

SEQ ID NO: 1264 - RNA, 19 nt, synthetic construct
  source 1..19: mol_type = other RNA
  modified_base 6: mod_base = OTHER; note = 2'-hypoxanthine-3'-phosphate
actttntggacacccctga

SEQ ID NO: 1265 - RNA, 19 nt, synthetic construct
  source 1..19: mol_type = other RNA
gggtgtccacaaagtcaaa

SEQ ID NO: 1266 - RNA, 19 nt, synthetic construct
  source 1..19: mol_type = other RNA
  modified_base 4: mod_base = OTHER; note = 2'-hypoxanthine-3'-phosphate
tttnactttgtggacaccc

SEQ ID NO: 1267 - RNA, 19 nt, synthetic construct
  source 1..19: mol_type = other RNA
ggtgtccacaaagtcaaag

SEQ ID NO: 1268 - RNA, 19 nt, synthetic construct
  source 1..19: mol_type = other RNA
  modified_base 5: mod_base = OTHER; note = 2'-hypoxanthine-3'-phosphate
ctttnactttgtggacacc

SEQ ID NO: 1269 - RNA, 19 nt, synthetic construct
  source 1..19: mol_type = other RNA
tgtccacaaagtcaaagct

SEQ ID NO: 1270 - RNA, 19 nt, synthetic construct
  source 1..19: mol_type = other RNA
  modified_base 2: mod_base = OTHER; note = 2'-hypoxanthine-3'-phosphate
anctttgactttgtggaca

SEQ ID NO: 1271 - RNA, 19 nt, synthetic construct
  source 1..19: mol_type = other RNA
tccacaaagtcaaagctat

SEQ ID NO: 1272 - RNA, 19 nt, synthetic construct
  source 1..19: mol_type = other RNA
  modified_base 4: mod_base = OTHER; note = 2'-hypoxanthine-3'-phosphate
atanctttgactttgtgga

SEQ ID NO: 1273 - RNA, 19 nt, synthetic construct
  source 1..19: mol_type = other RNA
ccacaaagtcaaagctatt

SEQ ID NO: 1274 - RNA, 19 nt, synthetic construct
  source 1..19: mol_type = other RNA
  modified_base 5: mod_base = OTHER; note = 2'-hypoxanthine-3'-phosphate
aatanctttgactttgtgg

SEQ ID NO: 1275 - RNA, 19 nt, synthetic construct
  source 1..19: mol_type = other RNA
cacaaagtcaaagctattt

SEQ ID NO: 1276 - RNA, 19 nt, synthetic construct
  source 1..19: mol_type = other RNA
  modified_base 6: mod_base = OTHER; note = 2'-hypoxanthine-3'-phosphate
aaatanctttgactttgtg

SEQ ID NO: 1277 - RNA, 19 nt, synthetic construct
  source 1..19: mol_type = other RNA
acaaagtcaaagctatttt

SEQ ID NO: 1278 - RNA, 19 nt, synthetic construct
  source 1..19: mol_type = other RNA
  modified_base 7: mod_base = OTHER; note = 2'-hypoxanthine-3'-phosphate
aaaatanctttgactttgt

SEQ ID NO: 1279 - RNA, 19 nt, synthetic construct
  source 1..19: mol_type = other RNA
agtcaaagctattttcata

SEQ ID NO: 1280 - RNA, 19 nt, synthetic construct
  source 1..19: mol_type = other RNA
  modified_base 4: mod_base = OTHER; note = 2'-hypoxanthine-3'-phosphate
tatnaaaatagctttgact

SEQ ID NO: 1281 - RNA, 19 nt, synthetic construct
  source 1..19: mol_type = other RNA
gtcaaagctattttcataa

SEQ ID NO: 1282 - RNA, 19 nt, synthetic construct
  source 1..19: mol_type = other RNA
  modified_base 5: mod_base = OTHER; note = 2'-hypoxanthine-3'-phosphate
ttatnaaaatagctttgac

SEQ ID NO: 1283 - RNA, 19 nt, synthetic construct
  source 1..19: mol_type = other RNA
tcaaagctattttcataat

SEQ ID NO: 1284 - RNA, 19 nt, synthetic construct
  source 1..19: mol_type = other RNA
  modified_base 6: mod_base = OTHER; note = 2'-hypoxanthine-3'-phosphate
attatnaaaatagctttga

SEQ ID NO: 1285 - RNA, 19 nt, synthetic construct
  source 1..19: mol_type = other RNA
ctattttcataataatact

SEQ ID NO: 1286 - RNA, 19 nt, synthetic construct
  source 1..19: mol_type = other RNA
  modified_base 2: mod_base = OTHER; note = 2'-hypoxanthine-3'-phosphate
antattattatgaaaatag

SEQ ID NO: 1287 - RNA, 19 nt, synthetic construct
  source 1..19: mol_type = other RNA
attttcataataatactaa

SEQ ID NO: 1288 - RNA, 19 nt, synthetic construct
  source 1..19: mol_type = other RNA
  modified_base 4: mod_base = OTHER; note = 2'-hypoxanthine-3'-phosphate
ttantattattatgaaaat

SEQ ID NO: 1289 - RNA, 19 nt, synthetic construct
  source 1..19: mol_type = other RNA
cataataatactaacatgt

SEQ ID NO: 1290 - RNA, 19 nt, synthetic construct
  source 1..19: mol_type = other RNA
  modified_base 5: mod_base = OTHER; note = 2'-hypoxanthine-3'-phosphate
acatnttagtattattatg

SEQ ID NO: 1291 - RNA, 19 nt, synthetic construct
  source 1..19: mol_type = other RNA
ataataatactaacatgtt

SEQ ID NO: 1292 - RNA, 19 nt, synthetic construct
  source 1..19: mol_type = other RNA
  modified_base 6: mod_base = OTHER; note = 2'-hypoxanthine-3'-phosphate
aacatnttagtattattat

SEQ ID NO: 1293 - RNA, 19 nt, synthetic construct
  source 1..19: mol_type = other RNA
actaacatgttatttgcct

SEQ ID NO: 1294 - RNA, 19 nt, synthetic construct
  source 1..19: mol_type = other RNA
  modified_base 2: mod_base = OTHER; note = 2'-hypoxanthine-3'-phosphate
angcaaataacatgttagt

SEQ ID NO: 1295 - RNA, 19 nt, synthetic construct
  source 1..19: mol_type = other RNA
taacatgttatttgccttt

SEQ ID NO: 1296 - RNA, 19 nt, synthetic construct
  source 1..19: mol_type = other RNA
  modified_base 4: mod_base = OTHER; note = 2'-hypoxanthine-3'-phosphate
aaangcaaataacatgtta

SEQ ID NO: 1297 - RNA, 19 nt, synthetic construct
  source 1..19: mol_type = other RNA
catgttatttgccttttga

SEQ ID NO: 1298 - RNA, 19 nt, synthetic construct
  source 1..19: mol_type = other RNA
  modified_base 7: mod_base = OTHER; note = 2'-hypoxanthine-3'-phosphate
tcaaaangcaaataacatg

SEQ ID NO: 1299 - RNA, 19 nt, synthetic construct
  source 1..19: mol_type = other RNA
tgccttttgaattctcatt

SEQ ID NO: 1300 - RNA, 19 nt, synthetic construct
  source 1..19: mol_type = other RNA
  modified_base 4: mod_base = OTHER; note = 2'-hypoxanthine-3'-phosphate
aatnagaattcaaaaggca

SEQ ID NO: 1301 - RNA, 19 nt, synthetic construct
  source 1..19: mol_type = other RNA
gccttttgaattctcatta

SEQ ID NO: 1302 - RNA, 19 nt, synthetic construct
  source 1..19: mol_type = other RNA
  modified_base 5: mod_base = OTHER; note = 2'-hypoxanthine-3'-phosphate
taatnagaattcaaaaggc

SEQ ID NO: 1303 - RNA, 19 nt, synthetic construct
  source 1..19: mol_type = other RNA
ccttttgaattctcattat

SEQ ID NO: 1304 - RNA, 19 nt, synthetic construct
  source 1..19: mol_type = other RNA
  modified_base 6: mod_base = OTHER; note = 2'-hypoxanthine-3'-phosphate
ataatnagaattcaaaagg

SEQ ID NO: 1305 - RNA, 19 nt, synthetic construct
  source 1..19: mol_type = other RNA
tgaattctcattatcttaa

SEQ ID NO: 1306 - RNA, 19 nt, synthetic construct
  source 1..19: mol_type = other RNA
  modified_base 5: mod_base = OTHER; note = 2'-hypoxanthine-3'-phosphate
ttaanataatgagaattca

SEQ ID NO: 1307 - RNA, 19 nt, synthetic construct
  source 1..19: mol_type = other RNA
gaattctcattatcttaaa

SEQ ID NO: 1308 - RNA, 19 nt, synthetic construct
  source 1..19: mol_type = other RNA
  modified_base 6: mod_base = OTHER; note = 2'-hypoxanthine-3'-phosphate
tttaanataatgagaattc

SEQ ID NO: 1309 - RNA, 19 nt, synthetic construct
  source 1..19: mol_type = other RNA
attctcattatcttaaaat

SEQ ID NO: 1310 - RNA, 19 nt, synthetic construct
  source 1..19: mol_type = other RNA
  modified_base 8: mod_base = OTHER; note = 2'-hypoxanthine-3'-phosphate
attttaanataatgagaat

SEQ ID NO: 1311 - RNA, 19 nt, synthetic construct
  source 1..19: mol_type = other RNA
cgtgtgacatgtgattaca

SEQ ID NO: 1312 - RNA, 19 nt, synthetic construct
  source 1..19: mol_type = other RNA
  modified_base 2: mod_base = OTHER; note = 2'-hypoxanthine-3'-phosphate
tntaatcacatgtcacacg

SEQ ID NO: 1313 - RNA, 19 nt, synthetic construct
  source 1..19: mol_type = other RNA
gtgtgacatgtgattacat

SEQ ID NO: 1314 - RNA, 19 nt, synthetic construct
  source 1..19: mol_type = other RNA
  modified_base 3: mod_base = OTHER; note = 2'-hypoxanthine-3'-phosphate
atntaatcacatgtcacac

SEQ ID NO: 1315 - RNA, 19 nt, synthetic construct
  source 1..19: mol_type = other RNA
tgacatgtgattacatcat

SEQ ID NO: 1316 - RNA, 19 nt, synthetic construct
  source 1..19: mol_type = other RNA
  modified_base 3: mod_base = OTHER; note = 2'-hypoxanthine-3'-phosphate
atnatgtaatcacatgtca

SEQ ID NO: 1317 - RNA, 19 nt, synthetic construct
  source 1..19: mol_type = other RNA
acatgtgattacatcatct

SEQ ID NO: 1318 - RNA, 19 nt, synthetic construct
  source 1..19: mol_type = other RNA
  modified_base 2: mod_base = OTHER; note = 2'-hypoxanthine-3'-phosphate
anatgatgtaatcacatgt

SEQ ID NO: 1319 - RNA, 19 nt, synthetic construct
  source 1..19: mol_type = other RNA
catgtgattacatcatctt

SEQ ID NO: 1320 - RNA, 19 nt, synthetic construct
  source 1..19: mol_type = other RNA
  modified_base 3: mod_base = OTHER; note = 2'-hypoxanthine-3'-phosphate
aanatgatgtaatcacatg

SEQ ID NO: 1321 - RNA, 19 nt, synthetic construct
  source 1..19: mol_type = other RNA
gtgattacatcatctttct

SEQ ID NO: 1322 - RNA, 19 nt, synthetic construct
  source 1..19: mol_type = other RNA
  modified_base 2: mod_base = OTHER; note = 2'-hypoxanthine-3'-phosphate
anaaagatgatgtaatcac

SEQ ID NO: 1323 - RNA, 19 nt, synthetic construct
  source 1..19: mol_type = other RNA
gattacatcatctttctga

SEQ ID NO: 1324 - RNA, 19 nt, synthetic construct
  source 1..19: mol_type = other RNA
  modified_base 4: mod_base = OTHER; note = 2'-hypoxanthine-3'-phosphate
tcanaaagatgatgtaatc

SEQ ID NO: 1325 - RNA, 19 nt, synthetic construct
  source 1..19: mol_type = other RNA
catcatctttctgacatca

SEQ ID NO: 1326 - RNA, 19 nt, synthetic construct
  source 1..19: mol_type = other RNA
  modified_base 2: mod_base = OTHER; note = 2'-hypoxanthine-3'-phosphate
tnatgtcagaaagatgatg

SEQ ID NO: 1327 - RNA, 19 nt, synthetic construct
  source 1..19: mol_type = other RNA
tcatctttctgacatcatt

SEQ ID NO: 1328 - RNA, 19 nt, synthetic construct
  source 1..19: mol_type = other RNA
  modified_base 4: mod_base = OTHER; note = 2'-hypoxanthine-3'-phosphate
aatnatgtcagaaagatga

SEQ ID NO: 1329 - RNA, 19 nt, synthetic construct
  source 1..19: mol_type = other RNA
tctttctgacatcattgtt

SEQ ID NO: 1330 - RNA, 19 nt, synthetic construct
  source 1..19: mol_type = other RNA
  modified_base 7: mod_base = OTHER; note = 2'-hypoxanthine-3'-phosphate
aacaatnatgtcagaaaga

SEQ ID NO: 1331 - RNA, 19 nt, synthetic construct
  source 1..19: mol_type = other RNA
ctttctgacatcattgtta

SEQ ID NO: 1332 - RNA, 19 nt, synthetic construct
  source 1..19: mol_type = other RNA
  modified_base 8: mod_base = OTHER; note = 2'-hypoxanthine-3'-phosphate
taacaatnatgtcagaaag

SEQ ID NO: 1333 - RNA, 19 nt, synthetic construct
  source 1..19: mol_type = other RNA
tgttaatggaatgtgtgct

SEQ ID NO: 1334 - RNA, 19 nt, synthetic construct
  source 1..19: mol_type = other RNA
  modified_base 2: mod_base = OTHER; note = 2'-hypoxanthine-3'-phosphate
ancacacattccattaaca

SEQ ID NO: 1335 - RNA, 19 nt, synthetic construct
  source 1..19: mol_type = other RNA
gttaatggaatgtgtgctt

SEQ ID NO: 1336 - RNA, 19 nt, synthetic construct
  source 1..19: mol_type = other RNA
  modified_base 3: mod_base = OTHER; note = 2'-hypoxanthine-3'-phosphate
aancacacattccattaac

SEQ ID NO: 1337 - RNA, 19 nt, synthetic construct
  source 1..19: mol_type = other RNA
gtgagggtcaagcacagct

SEQ ID NO: 1338 - RNA, 21 nt, synthetic construct
  source 1..21: mol_type = other RNA
  modified_base 5: mod_base = OTHER; note = 2'-hypoxanthine-3'-phosphate
agctntgcttgaccctcacag

SEQ ID NO: 1339 - RNA, 19 nt, synthetic construct
  source 1..19: mol_type = other RNA
gagggtcaagcacagctat

SEQ ID NO: 1340 - RNA, 21 nt, synthetic construct
  source 1..21: mol_type = other RNA
  modified_base 7: mod_base = OTHER; note = 2'-hypoxanthine-3'-phosphate
atagctntgcttgaccctcac

SEQ ID NO: 1341 - RNA, 19 nt, synthetic construct
  source 1..19: mol_type = other RNA
gggtcaagcacagctatcc

SEQ ID NO: 1342 - RNA, 21 nt, synthetic construct
  source 1..21: mol_type = other RNA
  modified_base 6: mod_base = OTHER; note = 2'-hypoxanthine-3'-phosphate
ggatanctgtgcttgaccctc

SEQ ID NO: 1343 - RNA, 19 nt, synthetic construct
  source 1..19: mol_type = other RNA
ggtcaagcacagctatcca

SEQ ID NO: 1344 - RNA, 21 nt, synthetic construct
  source 1..21: mol_type = other RNA
  modified_base 3: mod_base = OTHER; note = 2'-hypoxanthine-3'-phosphate
tgnatagctgtgcttgaccct

SEQ ID NO: 1345 - RNA, 19 nt, synthetic construct
  source 1..19: mol_type = other RNA
gtcaagcacagctatccat

SEQ ID NO: 1346 - RNA, 21 nt, synthetic construct
  source 1..21: mol_type = other RNA
  modified_base 4: mod_base = OTHER; note = 2'-hypoxanthine-3'-phosphate
atgnatagctgtgcttgaccc

SEQ ID NO: 1347 - RNA, 19 nt, synthetic construct
  source 1..19: mol_type = other RNA
tcaagcacagctatccatc

SEQ ID NO: 1348 - RNA, 21 nt, synthetic construct
  source 1..21: mol_type = other RNA
  modified_base 5: mod_base = OTHER; note = 2'-hypoxanthine-3'-phosphate
gatgnatagctgtgcttgacc

SEQ ID NO: 1349 - RNA, 19 nt, synthetic construct
  source 1..19: mol_type = other RNA
caagcacagctatccatca

SEQ ID NO: 1350 - RNA, 21 nt, synthetic construct
  source 1..21: mol_type = other RNA
  modified_base 5: mod_base = OTHER; note = 2'-hypoxanthine-3'-phosphate
tgatngatagctgtgcttgac

SEQ ID NO: 1351 - RNA, 19 nt, synthetic construct
  source 1..19: mol_type = other RNA
aagcacagctatccatcag

SEQ ID NO: 1352 - RNA, 21 nt, synthetic construct
  source 1..21: mol_type = other RNA
  modified_base 6: mod_base = OTHER; note = 2'-hypoxanthine-3'-phosphate
ctgatngatagctgtgcttga

SEQ ID NO: 1353 - RNA, 19 nt, synthetic construct
  source 1..19: mol_type = other RNA
agcacagctatccatcaga

SEQ ID NO: 1354 - RNA, 21 nt, synthetic construct
  source 1..21: mol_type = other RNA
  modified_base 7: mod_base = OTHER; note = 2'-hypoxanthine-3'-phosphate
tctgatngatagctgtgcttg

SEQ ID NO: 1355 - RNA, 19 nt, synthetic construct
  source 1..19: mol_type = other RNA
gcacagctatccatcagat

SEQ ID NO: 1356 - RNA, 21 nt, synthetic construct
  source 1..21: mol_type = other RNA
  modified_base 8: mod_base = OTHER; note = 2'-hypoxanthine-3'-phosphate
atctgatngatagctgtgctt

SEQ ID NO: 1357 - RNA, 19 nt, synthetic construct
  source 1..19: mol_type = other RNA
atccatcagatgatctact

SEQ ID NO: 1358 - RNA, 21 nt, synthetic construct
  source 1..21: mol_type = other RNA
  modified_base 5: mod_base = OTHER; note = 2'-hypoxanthine-3'-phosphate
agtanatcatctgatggatag

SEQ ID NO: 1359 - RNA, 19 nt, synthetic construct
  source 1..19: mol_type = other RNA
tccatcagatgatctactt

SEQ ID NO: 1360 - RNA, 21 nt, synthetic construct
  source 1..21: mol_type = other RNA
  modified_base 6: mod_base = OTHER; note = 2'-hypoxanthine-3'-phosphate
aagtanatcatctgatggata

SEQ ID NO: 1361 - RNA, 19 nt, synthetic construct
  source 1..19: mol_type = other RNA
ccatcagatgatctacttt

SEQ ID NO: 1362 - RNA, 21 nt, synthetic construct
  source 1..21: mol_type = other RNA
  modified_base 7: mod_base = OTHER; note = 2'-hypoxanthine-3'-phosphate
aaagtanatcatctgatggat

SEQ ID NO: 1363 - RNA, 19 nt, synthetic construct
  source 1..19: mol_type = other RNA
catcagatgatctactttc

SEQ ID NO: 1364 - RNA, 21 nt, synthetic construct
  source 1..21: mol_type = other RNA
  modified_base 8: mod_base = OTHER; note = 2'-hypoxanthine-3'-phosphate
gaaagtanatcatctgatgga

SEQ ID NO: 1365 - RNA, 19 nt, synthetic construct
  source 1..19: mol_type = other RNA
atcagatgatctactttca

SEQ ID NO: 1366 - RNA, 21 nt, synthetic construct
  source 1..21: mol_type = other RNA
  modified_base 6: mod_base = OTHER; note = 2'-hypoxanthine-3'-phosphate
tgaaantagatcatctgatgg

SEQ ID NO: 1367 - RNA, 19 nt, synthetic construct
  source 1..19: mol_type = other RNA
cagatgatctactttcagc

SEQ ID NO: 1368 - RNA, 21 nt, synthetic construct
  source 1..21: mol_type = other RNA
  modified_base 8: mod_base = OTHER; note = 2'-hypoxanthine-3'-phosphate
gctgaaantagatcatctgat

SEQ ID NO: 1369 - RNA, 19 nt, synthetic construct
  source 1..19: mol_type = other RNA
gatgatctactttcagcct

SEQ ID NO: 1370 - RNA, 21 nt, synthetic construct
  source 1..21: mol_type = other RNA
  modified_base 3: mod_base = OTHER; note = 2'-hypoxanthine-3'-phosphate
agnctgaaagtagatcatctg

SEQ ID NO: 1371 - RNA, 19 nt, synthetic construct
  source 1..19: mol_type = other RNA
atgatctactttcagcctt

SEQ ID NO: 1372 - RNA, 21 nt, synthetic construct
  source 1..21: mol_type = other RNA
  modified_base 4: mod_base = OTHER; note = 2'-hypoxanthine-3'-phosphate
aagnctgaaagtagatcatct

SEQ ID NO: 1373 - RNA, 19 nt, synthetic construct
  source 1..19: mol_type = other RNA
ttcctgagtcccagacaat

SEQ ID NO: 1374 - RNA, 21 nt, synthetic construct
  source 1..21: mol_type = other RNA
  modified_base 8: mod_base = OTHER; note = 2'-hypoxanthine-3'-phosphate
attgtctnggactcaggaagg

SEQ ID NO: 1375 - RNA, 19 nt, synthetic construct
  source 1..19: mol_type = other RNA
cattggcccccagcaatca

SEQ ID NO: 1376 - RNA, 21 nt, synthetic construct
  source 1..21: mol_type = other RNA
  modified_base 6: mod_base = OTHER; note = 2'-hypoxanthine-3'-phosphate
tgattnctgggggccaatgag

SEQ ID NO: 1377 - RNA, 19 nt, synthetic construct
  source 1..19: mol_type = other RNA
agctagccaagcagcaaat

SEQ ID NO: 1378 - RNA, 21 nt, synthetic construct
  source 1..21: mol_type = other RNA
  modified_base 8: mod_base = OTHER; note = 2'-hypoxanthine-3'-phosphate
atttgctncttggctagctcc

SEQ ID NO: 1379 - RNA, 19 nt, synthetic construct
  source 1..19: mol_type = other RNA
tagccaagcagcaaatcct

SEQ ID NO: 1380 - RNA, 21 nt, synthetic construct
  source 1..21: mol_type = other RNA
  modified_base 3: mod_base = OTHER; note = 2'-hypoxanthine-3'-phosphate
agnatttgctgcttggctagc

SEQ ID NO: 1381 - RNA, 19 nt, synthetic construct
  source 1..19: mol_type = other RNA
tcgtcccagaataactcat

SEQ ID NO: 1382 - RNA, 21 nt, synthetic construct
  source 1..21: mol_type = other RNA
  modified_base 5: mod_base = OTHER; note = 2'-hypoxanthine-3'-phosphate
atganttattctgggacgact

SEQ ID NO: 1383 - RNA, 19 nt, synthetic construct
  source 1..19: mol_type = other RNA
gaggtcatcagctttgcta

SEQ ID NO: 1384 - RNA, 21 nt, synthetic construct
  source 1..21: mol_type = other RNA
  modified_base 8: mod_base = OTHER; note = 2'-hypoxanthine-3'-phosphate
tagcaaanctgatgacctcct

SEQ ID NO: 1385 - RNA, 19 nt, synthetic construct
  source 1..19: mol_type = other RNA
ggtcatcagctttgctact

SEQ ID NO: 1386 - RNA, 21 nt, synthetic construct
  source 1..21: mol_type = other RNA
  modified_base 5: mod_base = OTHER; note = 2'-hypoxanthine-3'-phosphate
agtancaaagctgatgacctc

SEQ ID NO: 1387 - RNA, 19 nt, synthetic construct
  source 1..19: mol_type = other RNA
gtcatcagctttgctactg

SEQ ID NO: 1388 - RNA, 21 nt, synthetic construct
  source 1..21: mol_type = other RNA
  modified_base 6: mod_base = OTHER; note = 2'-hypoxanthine-3'-phosphate
cagtancaaagctgatgacct

SEQ ID NO: 1389 - RNA, 19 nt, synthetic construct
  source 1..19: mol_type = other RNA
tcatcagctttgctactgt

SEQ ID NO: 1390 - RNA, 21 nt, synthetic construct
  source 1..21: mol_type = other RNA
  modified_base 7: mod_base = OTHER; note = 2'-hypoxanthine-3'-phosphate
acagtancaaagctgatgacc

SEQ ID NO: 1391 - RNA, 19 nt, synthetic construct
  source 1..19: mol_type = other RNA
catcagctttgctactgtc

SEQ ID NO: 1392 - RNA, 21 nt, synthetic construct
  source 1..21: mol_type = other RNA
  modified_base 8: mod_base = OTHER; note = 2'-hypoxanthine-3'-phosphate
gacagtancaaagctgatgac

SEQ ID NO: 1393 - RNA, 19 nt, synthetic construct
  source 1..19: mol_type = other RNA
gctttgctactgtcacaga

SEQ ID NO: 1394 - RNA, 21 nt, synthetic construct
  source 1..21: mol_type = other RNA
  modified_base 6: mod_base = OTHER; note = 2'-hypoxanthine-3'-phosphate
tctgtnacagtagcaaagctg

SEQ ID NO: 1395 - RNA, 19 nt, synthetic construct
  source 1..19: mol_type = other RNA
tttgctactgtcacagact

SEQ ID NO: 1396 - RNA, 21 nt, synthetic construct
  source 1..21: mol_type = other RNA
  modified_base 6: mod_base = OTHER; note = 2'-hypoxanthine-3'-phosphate
agtctntgacagtagcaaagc

SEQ ID NO: 1397 - RNA, 19 nt, synthetic construct
  source 1..19: mol_type = other RNA
actgtcacagactccactt

SEQ ID NO: 1398 - RNA, 21 nt, synthetic construct
  source 1..21: mol_type = other RNA
  modified_base 5: mod_base = OTHER; note = 2'-hypoxanthine-3'-phosphate
aagtngagtctgtgacagtag

SEQ ID NO: 1399 - RNA, 19 nt, synthetic construct
  source 1..19: mol_type = other RNA
acccttcctggcactcttt

SEQ ID NO: 1400 - RNA, 21 nt, synthetic construct
  source 1..21: mol_type = other RNA
  modified_base 6: mod_base = OTHER; note = 2'-hypoxanthine-3'-phosphate
aaagantgccaggaagggtgg

SEQ ID NO: 1401 - RNA, 19 nt, synthetic construct
  source 1..19: mol_type = other RNA
cttcctggcactctttgct

SEQ ID NO: 1402 - RNA, 21 nt, synthetic construct
  source 1..21: mol_type = other RNA
  modified_base 7: mod_base = OTHER; note = 2'-hypoxanthine-3'-phosphate
agcaaanagtgccaggaaggg

SEQ ID NO: 1403 - RNA, 19 nt, synthetic construct
  source 1..19: mol_type = other RNA
gctggcataccttaactct

SEQ ID NO: 1404 - RNA, 21 nt, synthetic construct
  source 1..21: mol_type = other RNA
  modified_base 4: mod_base = OTHER; note = 2'-hypoxanthine-3'-phosphate
aganttaaggtatgccagccc

SEQ ID NO: 1405 - RNA, 19 nt, synthetic construct
  source 1..19: mol_type = other RNA
agtctggtgtcctgaaact

SEQ ID NO: 1406 - RNA, 21 nt, synthetic construct
  source 1..21: mol_type = other RNA
  modified_base 8: mod_base = OTHER; note = 2'-hypoxanthine-3'-phosphate
agtttcangacaccagacttc

SEQ ID NO: 1407 - RNA, 19 nt, synthetic construct
  source 1..19: mol_type = other RNA
ctggtgtcctgaaactgca

SEQ ID NO: 1408 - RNA, 21 nt, synthetic construct
  source 1..21: mol_type = other RNA
  modified_base 5: mod_base = OTHER; note = 2'-hypoxanthine-3'-phosphate
tgcantttcaggacaccagac

SEQ ID NO: 1409 - RNA, 19 nt, synthetic construct
  source 1..19: mol_type = other RNA
gtgtcctgaaactgcaact

SEQ ID NO: 1410 - RNA, 21 nt, synthetic construct
  source 1..21: mol_type = other RNA
  modified_base 5: mod_base = OTHER; note = 2'-hypoxanthine-3'-phosphate
agttncagtttcaggacacca

SEQ ID NO: 1411 - RNA, 19 nt, synthetic construct
  source 1..19: mol_type = other RNA
tgtcctgaaactgcaacta

SEQ ID NO: 1412 - RNA, 21 nt, synthetic construct
  source 1..21: mol_type = other RNA
  modified_base 6: mod_base = OTHER; note = 2'-hypoxanthine-3'-phosphate
tagttncagtttcaggacacc

SEQ ID NO: 1413 - RNA, 19 nt, synthetic construct
  source 1..19: mol_type = other RNA
gtcctgaaactgcaactag

SEQ ID NO: 1414 - RNA, 21 nt, synthetic construct
  source 1..21: mol_type = other RNA
  modified_base 7: mod_base = OTHER; note = 2'-hypoxanthine-3'-phosphate
ctagttncagtttcaggacac

SEQ ID NO: 1415 - RNA, 19 nt, synthetic construct
  source 1..19: mol_type = other RNA
agaaggcaacagcacagtt

SEQ ID NO: 1416 - RNA, 21 nt, synthetic construct
  source 1..21: mol_type = other RNA
  modified_base 7: mod_base = OTHER; note = 2'-hypoxanthine-3'-phosphate
aactgtnctgttgccttctag

SEQ ID NO: 1417 - RNA, 19 nt, synthetic construct
  source 1..19: mol_type = other RNA
aggcaacagcacagttact

SEQ ID NO: 1418 - RNA, 21 nt, synthetic construct
  source 1..21: mol_type = other RNA
  modified_base 8: mod_base = OTHER; note = 2'-hypoxanthine-3'-phosphate
agtaactntgctgttgccttc

SEQ ID NO: 1419 - RNA, 19 nt, synthetic construct
  source 1..19: mol_type = other RNA
agagcttaagatccgagcc

SEQ ID NO: 1420 - RNA, 21 nt, synthetic construct
  source 1..21: mol_type = other RNA
  modified_base 6: mod_base = OTHER; note = 2'-hypoxanthine-3'-phosphate
ggctcngatcttaagctctag

SEQ ID NO: 1421 - RNA, 19 nt, synthetic construct
  source 1..19: mol_type = other RNA
gagcttaagatccgagcca

SEQ ID NO: 1422 - RNA, 21 nt, synthetic construct
  source 1..21: mol_type = other RNA
  modified_base 3: mod_base = OTHER; note = 2'-hypoxanthine-3'-phosphate
tgnctcggatcttaagctcta

SEQ ID NO: 1423 - RNA, 19 nt, synthetic construct
  source 1..19: mol_type = other RNA
gcttaagatccgagccaat

SEQ ID NO: 1424 - RNA, 21 nt, synthetic construct
  source 1..21: mol_type = other RNA
  modified_base 5: mod_base = OTHER; note = 2'-hypoxanthine-3'-phosphate
attgnctcggatcttaagctc

SEQ ID NO: 1425 - RNA, 19 nt, synthetic construct
  source 1..19: mol_type = other RNA
tgttgcaggcgagaccatt

SEQ ID NO: 1426 - RNA, 21 nt, synthetic construct
  source 1..21: mol_type = other RNA
  modified_base 5: mod_base = OTHER; note = 2'-hypoxanthine-3'-phosphate
aatgntctcgcctgcaacata

SEQ ID NO: 1427 - RNA, 19 nt, synthetic construct
  source 1..19: mol_type = other RNA
cgagaccattacgtagact

SEQ ID NO: 1428 - RNA, 21 nt, synthetic construct
  source 1..21: mol_type = other RNA
  modified_base 8: mod_base = OTHER; note = 2'-hypoxanthine-3'-phosphate
agtctacntaatggtctcgcc

SEQ ID NO: 1429 - RNA, 19 nt, synthetic construct
  source 1..19: mol_type = other RNA
attacgtagacttccagga

SEQ ID NO: 1430 - RNA, 21 nt, synthetic construct
  source 1..21: mol_type = other RNA
  modified_base 6: mod_base = OTHER; note = 2'-hypoxanthine-3'-phosphate
tcctgnaagtctacgtaatgg

SEQ ID NO: 1431 - RNA, 19 nt, synthetic construct
  source 1..19: mol_type = other RNA
attgctgcctctttccatt

SEQ ID NO: 1432 - RNA, 21 nt, synthetic construct
  source 1..21: mol_type = other RNA
  modified_base 5: mod_base = OTHER; note = 2'-hypoxanthine-3'-phosphate
aatgnaaagaggcagcaatgc

SEQ ID NO: 1433 - RNA, 19 nt, synthetic construct
  source 1..19: mol_type = other RNA
ctttccattctgccgtctt

SEQ ID NO: 1434 - RNA, 21 nt, synthetic construct
  source 1..21: mol_type = other RNA
  modified_base 6: mod_base = OTHER; note = 2'-hypoxanthine-3'-phosphate
aagacngcagaatggaaagag

SEQ ID NO: 1435 - RNA, 19 nt, synthetic construct
  source 1..19: mol_type = other RNA
cctcctcaaagccaacaat

SEQ ID NO: 1436 - RNA, 21 nt, synthetic construct
  source 1..21: mol_type = other RNA
  modified_base 7: mod_base = OTHER; note = 2'-hypoxanthine-3'-phosphate
attgttngctttgaggaggct

SEQ ID NO: 1437 - RNA, 19 nt, synthetic construct
  source 1..19: mol_type = other RNA
cctcaaagccaacaatcct

SEQ ID NO: 1438 - RNA, 21 nt, synthetic construct
  source 1..21: mol_type = other RNA
  modified_base 3: mod_base = OTHER; note = 2'-hypoxanthine-3'-phosphate
agnattgttggctttgaggag

SEQ ID NO: 1439 - RNA, 19 nt, synthetic construct
  source 1..19: mol_type = other RNA
ctcaaagccaacaatcctt

SEQ ID NO: 1440 - RNA, 21 nt, synthetic construct
  source 1..21: mol_type = other RNA
  modified_base 4: mod_base = OTHER; note = 2'-hypoxanthine-3'-phosphate
aagnattgttggctttgagga

SEQ ID NO: 1441 - RNA, 19 nt, synthetic construct
  source 1..19: mol_type = other RNA
cctgccagtacctcctgtt

SEQ ID NO: 1442 - RNA, 21 nt, synthetic construct
  source 1..21: mol_type = other RNA
  modified_base 6: mod_base = OTHER; note = 2'-hypoxanthine-3'-phosphate
aacagnaggtactggcaggcc

SEQ ID NO: 1443 - RNA, 19 nt, synthetic construct
  source 1..19: mol_type = other RNA
agacggatgtgccagatat

SEQ ID NO: 1444 - RNA, 21 nt, synthetic construct
  source 1..21: mol_type = other RNA
  modified_base 8: mod_base = OTHER; note = 2'-hypoxanthine-3'-phosphate
atatctgncacatccgtcttg

SEQ ID NO: 1445 - RNA, 19 nt, synthetic construct
  source 1..19: mol_type = other RNA
tttggagtgaagagaccaa

SEQ ID NO: 1446 - RNA, 21 nt, synthetic construct
  source 1..21: mol_type = other RNA
  modified_base 4: mod_base = OTHER; note = 2'-hypoxanthine-3'-phosphate
ttgntctcttcactccaaagc

SEQ ID NO: 1447 - RNA, 19 nt, synthetic construct
  source 1..19: mol_type = other RNA
cctggcaatatgactcact

SEQ ID NO: 1448 - RNA, 21 nt, synthetic construct
  source 1..21: mol_type = other RNA
  modified_base 4: mod_base = OTHER; note = 2'-hypoxanthine-3'-phosphate
agtnagtcatattgccaggtg

SEQ ID NO: 1449 - RNA, 19 nt, synthetic construct
  source 1..19: mol_type = other RNA
ctggcaatatgactcactt

SEQ ID NO: 1450 - RNA, 21 nt, synthetic construct
  source 1..21: mol_type = other RNA
  modified_base 5: mod_base = OTHER; note = 2'-hypoxanthine-3'-phosphate
aagtnagtcatattgccaggt

SEQ ID NO: 1451 - RNA, 19 nt, synthetic construct
  source 1..19: mol_type = other RNA
aatgggcactttcttgtct

SEQ ID NO: 1452 - RNA, 21 nt, synthetic construct
  source 1..21: mol_type = other RNA
  modified_base 7: mod_base = OTHER; note = 2'-hypoxanthine-3'-phosphate
agacaanaaagtgcccatttg

SEQ ID NO: 1453 - RNA, 19 nt, synthetic construct
  source 1..19: mol_type = other RNA
cactttcttgtctgagact

SEQ ID NO: 1454 - RNA, 21 nt, synthetic construct
  source 1..21: mol_type = other RNA
  modified_base 8: mod_base = OTHER; note = 2'-hypoxanthine-3'-phosphate
agtctcanacaagaaagtgcc

SEQ ID NO: 1455 - RNA, 19 nt, synthetic construct
  source 1..19: mol_type = other RNA
ctttcttgtctgagactct

SEQ ID NO: 1456 - RNA, 21 nt, synthetic construct
  source 1..21: mol_type = other RNA
  modified_base 4: mod_base = OTHER; note = 2'-hypoxanthine-3'-phosphate
agantctcagacaagaaagtg

SEQ ID NO: 1457 - RNA, 19 nt, synthetic construct
  source 1..19: mol_type = other RNA
tgtctgagactctggctta

SEQ ID NO: 1458 - RNA, 21 nt, synthetic construct
  source 1..21: mol_type = other RNA
  modified_base 8: mod_base = OTHER; note = 2'-hypoxanthine-3'-phosphate
taagccanagtctcagacaag

SEQ ID NO: 1459 - RNA, 19 nt, synthetic construct
  source 1..19: mol_type = other RNA
gggtaaagcgtttcttcta

SEQ ID NO: 1460 - RNA, 21 nt, synthetic construct
  source 1..21: mol_type = other RNA
  modified_base 6: mod_base = OTHER; note = 2'-hypoxanthine-3'-phosphate
tagaanaaacgctttacccat

SEQ ID NO: 1461 - RNA, 19 nt, synthetic construct
  source 1..19: mol_type = other RNA
ggtaaagcgtttcttctaa

SEQ ID NO: 1462 - RNA, 21 nt, synthetic construct
  source 1..21: mol_type = other RNA
  modified_base 7: mod_base = OTHER; note = 2'-hypoxanthine-3'-phosphate
ttagaanaaacgctttaccca

SEQ ID NO: 1463 - RNA, 19 nt, synthetic construct
  source 1..19: mol_type = other RNA
gtaaagcgtttcttctaaa

SEQ ID NO: 1464 - RNA, 21 nt, synthetic construct
  source 1..21: mol_type = other RNA
  modified_base 8: mod_base = OTHER; note = 2'-hypoxanthine-3'-phosphate
tttagaanaaacgctttaccc

SEQ ID NO: 1465 - RNA, 19 nt, synthetic construct
  source 1..19: mol_type = other RNA
ccagaaagcatgatttcct

SEQ ID NO: 1466 - RNA, 21 nt, synthetic construct
  source 1..21: mol_type = other RNA
  modified_base 3: mod_base = OTHER; note = 2'-hypoxanthine-3'-phosphate
agnaaatcatgctttctgggt

SEQ ID NO: 1467 - RNA, 19 nt, synthetic construct
  source 1..19: mol_type = other RNA
aagcatgatttcctgccct

SEQ ID NO: 1468 - RNA, 21 nt, synthetic construct
  source 1..21: mol_type = other RNA
  modified_base 3: mod_base = OTHER; note = 2'-hypoxanthine-3'-phosphate
agngcaggaaatcatgctttc

SEQ ID NO: 1469 - RNA, 19 nt, synthetic construct
  source 1..19: mol_type = other RNA
atgatttcctgccctaagt

SEQ ID NO: 1470 - RNA, 21 nt, synthetic construct
  source 1..21: mol_type = other RNA
  modified_base 7: mod_base = OTHER; note = 2'-hypoxanthine-3'-phosphate
acttagngcaggaaatcatgc

SEQ ID NO: 1471 - RNA, 19 nt, synthetic construct
  source 1..19: mol_type = other RNA
agggctgttgaggtacctt

SEQ ID NO: 1472 - RNA, 21 nt, synthetic construct
  source 1..21: mol_type = other RNA
  modified_base 4: mod_base = OTHER; note = 2'-hypoxanthine-3'-phosphate
aagntacctcaacagccctta

SEQ ID NO: 1473 - RNA, 19 nt, synthetic construct
  source 1..19: mol_type = other RNA
ggctgttgaggtaccttaa

SEQ ID NO: 1474 - RNA, 21 nt, synthetic construct
  source 1..21: mol_type = other RNA
  modified_base 6: mod_base = OTHER; note = 2'-hypoxanthine-3'-phosphate
ttaagntacctcaacagccct

SEQ ID NO: 1475 - RNA, 19 nt, synthetic construct
  source 1..19: mol_type = other RNA
gtcaggaaaatgaggcact

SEQ ID NO: 1476 - RNA, 21 nt, synthetic construct
  source 1..21: mol_type = other RNA
  modified_base 4: mod_base = OTHER; note = 2'-hypoxanthine-3'-phosphate
agtncctcattttcctgactc

SEQ ID NO: 1477 - RNA, 19 nt, synthetic construct
  source 1..19: mol_type = other RNA
acaagcatttatactttct

SEQ ID NO: 1478 - RNA, 19 nt, synthetic construct
  source 1..19: mol_type = other RNA
  modified_base 6: mod_base = OTHER; note = 2'-hypoxanthine-3'-phosphate
agaaantataaatgcttgt

SEQ ID NO: 1479 - RNA, 19 nt, synthetic construct
  source 1..19: mol_type = other RNA
caagcatttatactttctt

SEQ ID NO: 1480 - RNA, 19 nt, synthetic construct
  source 1..19: mol_type = other RNA
  modified_base 7: mod_base = OTHER; note = 2'-hypoxanthine-3'-phosphate
aagaaantataaatgcttg

SEQ ID NO: 1481 - RNA, 19 nt, synthetic construct
  source 1..19: mol_type = other RNA
gcatttatactttctttct

SEQ ID NO: 1482 - RNA, 19 nt, synthetic construct
  source 1..19: mol_type = other RNA
  modified_base 6: mod_base = OTHER; note = 2'-hypoxanthine-3'-phosphate
agaaanaaagtataaatgc

SEQ ID NO: 1483 - RNA, 19 nt, synthetic construct
  source 1..19: mol_type = other RNA
catttatactttctttctt

SEQ ID NO: 1484 - RNA, 19 nt, synthetic construct
  source 1..19: mol_type = other RNA
  modified_base 7: mod_base = OTHER; note = 2'-hypoxanthine-3'-phosphate
aagaaanaaagtataaatg

SEQ ID NO: 1485 - RNA, 19 nt, synthetic construct
  source 1..19: mol_type = other RNA
ggagaaagaaaatcaacaa

SEQ ID NO: 1486 - RNA, 19 nt, synthetic construct
  source 1..19: mol_type = other RNA
  modified_base 6: mod_base = OTHER; note = 2'-hypoxanthine-3'-phosphate
ttgttnattttctttctcc

SEQ ID NO: 1487 - RNA, 19 nt, synthetic construct
  source 1..19: mol_type = other RNA
agaaagaaaatcaacaaat

SEQ ID NO: 1488 - RNA, 19 nt, synthetic construct
  source 1..19: mol_type = other RNA
  modified_base 8: mod_base = OTHER; note = 2'-hypoxanthine-3'-phosphate
atttgttnattttctttct

SEQ ID NO: 1489 - RNA, 19 nt, synthetic construct
  source 1..19: mol_type = other RNA
atggtccagagcaacagtt

SEQ ID NO: 1490 - RNA, 19 nt, synthetic construct
  source 1..19: mol_type = other RNA
  modified_base 8: mod_base = OTHER; note = 2'-hypoxanthine-3'-phosphate
aactgttnctctggaccat

SEQ ID NO: 1491 - RNA, 19 nt, synthetic construct
  source 1..19: mol_type = other RNA
gtccagagcaacagttctt

SEQ ID NO: 1492 - RNA, 19 nt, synthetic construct
  source 1..19: mol_type = other RNA
  modified_base 8: mod_base = OTHER; note = 2'-hypoxanthine-3'-phosphate
aagaactnttgctctggac

SEQ ID NO: 1493 - RNA, 19 nt, synthetic construct
  source 1..19: mol_type = other RNA
cagagcaacagttcttcaa

SEQ ID NO: 1494 - RNA, 19 nt, synthetic construct
  source 1..19: mol_type = other RNA
  modified_base 6: mod_base = OTHER; note = 2'-hypoxanthine-3'-phosphate
ttgaanaactgttgctctg

SEQ ID NO: 1495 - RNA, 19 nt, synthetic construct
  source 1..19: mol_type = other RNA
gagcaacagttcttcaagt

SEQ ID NO: 1496 - RNA, 19 nt, synthetic construct
  source 1..19: mol_type = other RNA
  modified_base 8: mod_base = OTHER; note = 2'-hypoxanthine-3'-phosphate
acttgaanaactgttgctc

SEQ ID NO: 1497 - RNA, 19 nt, synthetic construct
  source 1..19: mol_type = other RNA
gtgtactctgtaggcttct

SEQ ID NO: 1498 - RNA, 19 nt, synthetic construct
  source 1..19: mol_type = other RNA
  modified_base 5: mod_base = OTHER; note = 2'-hypoxanthine-3'-phosphate
agaancctacagagtacac

SEQ ID NO: 1499 - RNA, 19 nt, synthetic construct
  source 1..19: mol_type = other RNA
gcttctgggaggtcccttt

SEQ ID NO: 1500 - RNA, 19 nt, synthetic construct
  source 1..19: mol_type = other RNA
  modified_base 5: mod_base = OTHER; note = 2'-hypoxanthine-3'-phosphate
aaagngacctcccagaagc

SEQ ID NO: 1501 - RNA, 19 nt, synthetic construct
  source 1..19: mol_type = other RNA
tcaggggtgtccacaaagt

SEQ ID NO: 1502 - RNA, 19 nt, synthetic construct
  source 1..19: mol_type = other RNA
  modified_base 8: mod_base = OTHER; note = 2'-hypoxanthine-3'-phosphate
actttgtngacacccctga

SEQ ID NO: 1503 - RNA, 19 nt, synthetic construct
  source 1..19: mol_type = other RNA
tgtccacaaagtcaaagct

SEQ ID NO: 1504 - RNA, 19 nt, synthetic construct
  source 1..19: mol_type = other RNA
  modified_base 7: mod_base = OTHER; note = 2'-hypoxanthine-3'-phosphate
agctttnactttgtggaca

SEQ ID NO: 1505 - RNA, 19 nt, synthetic construct
  source 1..19: mol_type = other RNA
actaacatgttatttgcct

SEQ ID NO: 1506 - RNA, 19 nt, synthetic construct
  source 1..19: mol_type = other RNA
  modified_base 3: mod_base = OTHER; note = 2'-hypoxanthine-3'-phosphate
agncaaataacatgttagt

SEQ ID NO: 1507 - RNA, 19 nt, synthetic construct
  source 1..19: mol_type = other RNA
taacatgttatttgccttt

SEQ ID NO: 1508 - RNA, 19 nt, synthetic construct
  source 1..19: mol_type = other RNA
  modified_base 5: mod_base = OTHER; note = 2'-hypoxanthine-3'-phosphate
aaagncaaataacatgtta

SEQ ID NO: 1509 - RNA, 19 nt, synthetic construct
  source 1..19: mol_type = other RNA
catgttatttgccttttga

SEQ ID NO: 1510 - RNA, 19 nt, synthetic construct
  source 1..19: mol_type = other RNA
  modified_base 8: mod_base = OTHER; note = 2'-hypoxanthine-3'-phosphate
tcaaaagncaaataacatg

SEQ ID NO: 1511 - RNA, 19 nt, synthetic construct
  source 1..19: mol_type = other RNA
tgccttttgaattctcatt

SEQ ID NO: 1512 - RNA, 19 nt, synthetic construct
  source 1..19: mol_type = other RNA
  modified_base 6: mod_base = OTHER; note = 2'-hypoxanthine-3'-phosphate
aatganaattcaaaaggca

SEQ ID NO: 1513 - RNA, 19 nt, synthetic construct
  source 1..19: mol_type = other RNA
gccttttgaattctcatta

SEQ ID NO: 1514 - RNA, 19 nt, synthetic construct
  source 1..19: mol_type = other RNA
  modified_base 7: mod_base = OTHER; note = 2'-hypoxanthine-3'-phosphate
taatganaattcaaaaggc

SEQ ID NO: 1515 - RNA, 19 nt, synthetic construct
  source 1..19: mol_type = other RNA
ccttttgaattctcattat

SEQ ID NO: 1516 - RNA, 19 nt, synthetic construct
  source 1..19: mol_type = other RNA
  modified_base 8: mod_base = OTHER; note = 2'-hypoxanthine-3'-phosphate
ataatganaattcaaaagg

SEQ ID NO: 1517 - RNA, 19 nt, synthetic construct
  source 1..19: mol_type = other RNA
tgacatgtgattacatcat

SEQ ID NO: 1518 - RNA, 19 nt, synthetic construct
  source 1..19: mol_type = other RNA
  modified_base 6: mod_base = OTHER; note = 2'-hypoxanthine-3'-phosphate
atgatntaatcacatgtca

SEQ ID NO: 1519 - RNA, 19 nt, synthetic construct
  source 1..19: mol_type = other RNA
acatgtgattacatcatct

SEQ ID NO: 1520 - RNA, 19 nt, synthetic construct
  source 1..19: mol_type = other RNA
  modified_base 5: mod_base = OTHER; note = 2'-hypoxanthine-3'-phosphate
agatnatgtaatcacatgt

SEQ ID NO: 1521 - RNA, 19 nt, synthetic construct
  source 1..19: mol_type = other RNA
catgtgattacatcatctt

SEQ ID NO: 1522 - RNA, 19 nt, synthetic construct
  source 1..19: mol_type = other RNA
  modified_base 6: mod_base = OTHER; note = 2'-hypoxanthine-3'-phosphate
aagatnatgtaatcacatg

SEQ ID NO: 1523 - RNA, 19 nt, synthetic construct
  source 1..19: mol_type = other RNA
gtgattacatcatctttct

SEQ ID NO: 1524 - RNA, 19 nt, synthetic construct
  source 1..19: mol_type = other RNA
  modified_base 6: mod_base = OTHER; note = 2'-hypoxanthine-3'-phosphate
agaaanatgatgtaatcac

SEQ ID NO: 1525 - RNA, 19 nt, synthetic construct
  source 1..19: mol_type = other RNA
gattacatcatctttctga

SEQ ID NO: 1526 - RNA, 19 nt, synthetic construct
  source 1..19: mol_type = other RNA
  modified_base 8: mod_base = OTHER; note = 2'-hypoxanthine-3'-phosphate
tcagaaanatgatgtaatc

SEQ ID NO: 1527 - RNA, 19 nt, synthetic construct
  source 1..19: mol_type = other RNA
catcatctttctgacatca

SEQ ID NO: 1528 - RNA, 19 nt, synthetic construct
  source 1..19: mol_type = other RNA
  modified_base 5: mod_base = OTHER; note = 2'-hypoxanthine-3'-phosphate
tgatntcagaaagatgatg

SEQ ID NO: 1529 - RNA, 19 nt, synthetic construct
  source 1..19: mol_type = other RNA
tcatctttctgacatcatt

SEQ ID NO: 1530 - RNA, 19 nt, synthetic construct
  source 1..19: mol_type = other RNA
  modified_base 7: mod_base = OTHER; note = 2'-hypoxanthine-3'-phosphate
aatgatntcagaaagatga

SEQ ID NO: 1531 - RNA, 19 nt, synthetic construct
  source 1..19: mol_type = other RNA
gtgagggtcaagcacagct

SEQ ID NO: 1532 - RNA, 21 nt, synthetic construct
  source 1..21: mol_type = other RNA
  modified_base 7: mod_base = OTHER; note = 2'-hypoxanthine-3'-phosphate
agctgtncttgaccctcacag

SEQ ID NO: 1533 - RNA, 19 nt, synthetic construct
  source 1..19: mol_type = other RNA
ggtcaagcacagctatcca

SEQ ID NO: 1534 - RNA, 21 nt, synthetic construct
  source 1..21: mol_type = other RNA
  modified_base 7: mod_base = OTHER; note = 2'-hypoxanthine-3'-phosphate
tggatanctgtgcttgaccct

SEQ ID NO: 1535 - RNA, 19 nt, synthetic construct
  source 1..19: mol_type = other RNA
gtcaagcacagctatccat

SEQ ID NO: 1536 - RNA, 21 nt, synthetic construct
  source 1..21: mol_type = other RNA
  modified_base 8: mod_base = OTHER; note = 2'-hypoxanthine-3'-phosphate
atggatanctgtgcttgaccc

SEQ ID NO: 1537 - RNA, 19 nt, synthetic construct
  source 1..19: mol_type = other RNA
caagcacagctatccatca

SEQ ID NO: 1538 - RNA, 21 nt, synthetic construct
  source 1..21: mol_type = other RNA
  modified_base 6: mod_base = OTHER; note = 2'-hypoxanthine-3'-phosphate
tgatgnatagctgtgcttgac

SEQ ID NO: 1539 - RNA, 19 nt, synthetic construct
  source 1..19: mol_type = other RNA
aagcacagctatccatcag

SEQ ID NO: 1540 - RNA, 21 nt, synthetic construct
  source 1..21: mol_type = other RNA
  modified_base 7: mod_base = OTHER; note = 2'-hypoxanthine-3'-phosphate
ctgatgnatagctgtgcttga

SEQ ID NO: 1541 - RNA, 19 nt, synthetic construct
  source 1..19: mol_type = other RNA
agcacagctatccatcaga

SEQ ID NO: 1542 - RNA, 21 nt, synthetic construct
  source 1..21: mol_type = other RNA
  modified_base 8: mod_base = OTHER; note = 2'-hypoxanthine-3'-phosphate
tctgatgnatagctgtgcttg

SEQ ID NO: 1543 - RNA, 19 nt, synthetic construct
  source 1..19: mol_type = other RNA
gatgatctactttcagcct

SEQ ID NO: 1544 - RNA, 21 nt, synthetic construct
  source 1..21: mol_type = other RNA
  modified_base 6: mod_base = OTHER; note = 2'-hypoxanthine-3'-phosphate
aggctnaaagtagatcatctg

SEQ ID NO: 1545 - RNA, 19 nt, synthetic construct
  source 1..19: mol_type = other RNA
atgatctactttcagcctt

SEQ ID NO: 1546 - RNA, 21 nt, synthetic construct
  source 1..21: mol_type = other RNA
  modified_base 7: mod_base = OTHER; note = 2'-hypoxanthine-3'-phosphate
aaggctnaaagtagatcatct

SEQ ID NO: 1547 - RNA, 19 nt, synthetic construct
  source 1..19: mol_type = other RNA
tagccaagcagcaaatcct

SEQ ID NO: 1548 - RNA, 21 nt, synthetic construct
  source 1..21: mol_type = other RNA
  modified_base 8: mod_base = OTHER; note = 2'-hypoxanthine-3'-phosphate
aggatttnctgcttggctagc

SEQ ID NO: 1549 - RNA, 19 nt, synthetic construct
  source 1..19: mol_type = other RNA
tttgctactgtcacagact

SEQ ID NO: 1550 - RNA, 21 nt, synthetic construct
  source 1..21: mol_type = other RNA
  modified_base 8: mod_base = OTHER; note = 2'-hypoxanthine-3'-phosphate
agtctgtnacagtagcaaagc

SEQ ID NO: 1551 - RNA, 19 nt, synthetic construct
  source 1..19: mol_type = other RNA
actgtcacagactccactt

SEQ ID NO: 1552 - RNA, 21 nt, synthetic construct
  source 1..21: mol_type = other RNA
  modified_base 6: mod_base = OTHER; note = 2'-hypoxanthine-3'-phosphate
aagtgnagtctgtgacagtag

SEQ ID NO: 1553 - RNA, 19 nt, synthetic construct
  source 1..19: mol_type = other RNA
acccttcctggcactcttt

SEQ ID NO: 1554 - RNA, 21 nt, synthetic construct
  source 1..21: mol_type = other RNA
  modified_base 8: mod_base = OTHER; note = 2'-hypoxanthine-3'-phosphate
aaagagtnccaggaagggtgg

SEQ ID NO: 1555 - RNA, 19 nt, synthetic construct
  source 1..19: mol_type = other RNA
gtgtcctgaaactgcaact

SEQ ID NO: 1556 - RNA, 21 nt, synthetic construct
  source 1..21: mol_type = other RNA
  modified_base 8: mod_base = OTHER; note = 2'-hypoxanthine-3'-phosphate
agttgcantttcaggacacca

SEQ ID NO: 1557 - RNA, 19 nt, synthetic construct
  source 1..19: mol_type = other RNA
agagcttaagatccgagcc

SEQ ID NO: 1558 - RNA, 21 nt, synthetic construct
  source 1..21: mol_type = other RNA
  modified_base 7: mod_base = OTHER; note = 2'-hypoxanthine-3'-phosphate
ggctcgnatcttaagctctag

SEQ ID NO: 1559 - RNA, 19 nt, synthetic construct
  source 1..19: mol_type = other RNA
gagcttaagatccgagcca

SEQ ID NO: 1560 - RNA, 21 nt, synthetic construct
  source 1..21: mol_type = other RNA
  modified_base 7: mod_base = OTHER; note = 2'-hypoxanthine-3'-phosphate
tggctcngatcttaagctcta

SEQ ID NO: 1561 - RNA, 19 nt, synthetic construct
  source 1..19: mol_type = other RNA
ctttccattctgccgtctt

SEQ ID NO: 1562 - RNA, 21 nt, synthetic construct
  source 1..21: mol_type = other RNA
  modified_base 7: mod_base = OTHER; note = 2'-hypoxanthine-3'-phosphate
aagacgncagaatggaaagag

SEQ ID NO: 1563 - RNA, 19 nt, synthetic construct
  source 1..19: mol_type = other RNA
cctcctcaaagccaacaat

SEQ ID NO: 1564 - RNA, 21 nt, synthetic construct
  source 1..21: mol_type = other RNA
  modified_base 8: mod_base = OTHER; note = 2'-hypoxanthine-3'-phosphate
attgttgnctttgaggaggct

SEQ ID NO: 1565 - RNA, 19 nt, synthetic construct
  source 1..19: mol_type = other RNA
cctcaaagccaacaatcct

SEQ ID NO: 1566 - RNA, 21 nt, synthetic construct
  source 1..21: mol_type = other RNA
  modified_base 7: mod_base = OTHER; note = 2'-hypoxanthine-3'-phosphate
aggattnttggctttgaggag

SEQ ID NO: 1567 - RNA, 19 nt, synthetic construct
  source 1..19: mol_type = other RNA
ctcaaagccaacaatcctt

SEQ ID NO: 1568 - RNA, 21 nt, synthetic construct
  source 1..21: mol_type = other RNA
  modified_base 8: mod_base = OTHER; note = 2'-hypoxanthine-3'-phosphate
aaggattnttggctttgagga

SEQ ID NO: 1569 - RNA, 19 nt, synthetic construct
  source 1..19: mol_type = other RNA
cctgccagtacctcctgtt

SEQ ID NO: 1570 - RNA, 21 nt, synthetic construct
  source 1..21: mol_type = other RNA
  modified_base 8: mod_base = OTHER; note = 2'-hypoxanthine-3'-phosphate
aacaggangtactggcaggcc

SEQ ID NO: 1571 - RNA, 19 nt, synthetic construct
  source 1..19: mol_type = other RNA
cctggcaatatgactcact

SEQ ID NO: 1572 - RNA, 21 nt, synthetic construct
  source 1..21: mol_type = other RNA
  modified_base 6: mod_base = OTHER; note = 2'-hypoxanthine-3'-phosphate
agtgantcatattgccaggtg

SEQ ID NO: 1573 - RNA, 19 nt, synthetic construct
  source 1..19: mol_type = other RNA
ctggcaatatgactcactt

SEQ ID NO: 1574 - RNA, 21 nt, synthetic construct
  source 1..21: mol_type = other RNA
  modified_base 7: mod_base = OTHER; note = 2'-hypoxanthine-3'-phosphate
aagtgantcatattgccaggt

SEQ ID NO: 1575 - RNA, 19 nt, synthetic construct
  source 1..19: mol_type = other RNA
aagcatgatttcctgccct

SEQ ID NO: 1576 - RNA, 21 nt, synthetic construct
  source 1..21: mol_type = other RNA
  modified_base 4: mod_base = OTHER; note = 2'-hypoxanthine-3'-phosphate
aggncaggaaatcatgctttc

SEQ ID NO: 1577 - RNA, 19 nt, synthetic construct
  source 1..19: mol_type = other RNA
atgatttcctgccctaagt

SEQ ID NO: 1578 - RNA, 21 nt, synthetic construct
  source 1..21: mol_type = other RNA
  modified_base 8: mod_base = OTHER; note = 2'-hypoxanthine-3'-phosphate
acttaggncaggaaatcatgc

SEQ ID NO: 1579 - RNA, 19 nt, synthetic construct
  source 1..19: mol_type = other RNA
gcttctgggaggtcccttt

SEQ ID NO: 1580 - RNA, 19 nt, synthetic construct
  source 1..19: mol_type = other RNA
  modified_base 6: mod_base = OTHER; note = 2'-hypoxanthine-3'-phosphate
aaaggnacctcccagaagc

SEQ ID NO: 1581 - RNA, 19 nt, synthetic construct
  source 1..19: mol_type = other RNA
acatgtgattacatcatct

SEQ ID NO: 1582 - RNA, 19 nt, synthetic construct
  source 1..19: mol_type = other RNA
  modified_base 8: mod_base = OTHER; note = 2'-hypoxanthine-3'-phosphate
agatgatntaatcacatgt

SEQ ID NO: 1583 - RNA, 19 nt, synthetic construct
  source 1..19: mol_type = other RNA
actgtcacagactccactt

SEQ ID NO: 1584 - RNA, 21 nt, synthetic construct
  source 1..21: mol_type = other RNA
  modified_base 8: mod_base = OTHER; note = 2'-hypoxanthine-3'-phosphate
aagtggantctgtgacagtag

SEQ ID NO: 1585 - RNA, 19 nt, synthetic construct
  source 1..19: mol_type = other RNA
gagcttaagatccgagcca

SEQ ID NO: 1586 - RNA, 21 nt, synthetic construct
  source 1..21: mol_type = other RNA
  modified_base 8: mod_base = OTHER; note = 2'-hypoxanthine-3'-phosphate
tggctcgnatcttaagctcta

SEQ ID NO: 1587 - RNA, 19 nt, synthetic construct
  source 1..19: mol_type = other RNA
aagcatgatttcctgccct

SEQ ID NO: 1588 - RNA, 21 nt, synthetic construct
  source 1..21: mol_type = other RNA
  modified_base 7: mod_base = OTHER; note = 2'-hypoxanthine-3'-phosphate
agggcangaaatcatgctttc

SEQ ID NO: 1589 - RNA, 19 nt, synthetic construct
  source 1..19: mol_type = other RNA
aagcatgatttcctgccct

SEQ ID NO: 1590 - RNA, 21 nt, synthetic construct
  source 1..21: mol_type = other RNA
  modified_base 8: mod_base = OTHER; note = 2'-hypoxanthine-3'-phosphate
agggcagnaaatcatgctttc

SEQ ID NO: 1591 - RNA, 21 nt, synthetic construct
  source 1..21: mol_type = other RNA
aattctccgaacgtgtcacgt

SEQ ID NO: 1592 - RNA, 21 nt, synthetic construct
  source 1..21: mol_type = other RNA
acgtgacacgttcggagaatt

SEQ ID NO: 1593 - RNA, 21 nt, synthetic construct
  source 1..21: mol_type = other RNA
accagtcgtcccagaataact

SEQ ID NO: 1594 - RNA, 23 nt, synthetic construct
  source 1..23: mol_type = other RNA
  modified_base 7: mod_base = OTHER; note = 2'-thymine-3'-phosphate
agttattctgggacgactggtca

SEQ ID NO: 1595 - RNA, 21 nt, synthetic construct
  source 1..21: mol_type = other RNA
accagtcgtcccagaataact

SEQ ID NO: 1596 - RNA, 23 nt, synthetic construct
  source 1..23: mol_type = other RNA
  modified_base 7: mod_base = OTHER; note = 2'-thymine-3'-phosphate
agttattctgggacgactggtct

SEQ ID NO: 1597 - RNA, 21 nt, synthetic construct
  source 1..21: mol_type = other RNA
ccagaataactcatcctccat

SEQ ID NO: 1598 - RNA, 23 nt, synthetic construct
  source 1..23: mol_type = other RNA
  modified_base 2: mod_base = OTHER; note = 2'-thymine-3'-phosphate
atggaggatgagttattctggga

SEQ ID NO: 1599 - RNA, 21 nt, synthetic construct
  source 1..21: mol_type = other RNA
ctgtcacagactccacttcat

SEQ ID NO: 1600 - RNA, 23 nt, synthetic construct
  source 1..23: mol_type = other RNA
  modified_base 7: mod_base = OTHER; note = 2'-thymine-3'-phosphate
atgaagtggagtctgtgacagta

SEQ ID NO: 1601 - RNA, 21 nt, synthetic construct
  source 1..21: mol_type = other RNA
tgtcacagactccacttcagt

SEQ ID NO: 1602 - RNA, 23 nt, synthetic construct
  source 1..23: mol_type = other RNA
actgaagtggagtctgtgacagt

SEQ ID NO: 1603 - RNA, 21 nt, synthetic construct
  source 1..21: mol_type = other RNA
ctttgcttgaggatcttccgt

SEQ ID NO: 1604 - RNA, 23 nt, synthetic construct
  source 1..23: mol_type = other RNA
  modified_base 12: mod_base = OTHER; note = 2'-thymine-3'-phosphate
acggaagatcctcaagcaaagag

SEQ ID NO: 1605 - RNA, 21 nt, synthetic construct
  source 1..21: mol_type = other RNA
aatgggcactttcttgtctgt

SEQ ID NO: 1606 - RNA, 23 nt, synthetic construct
  source 1..23: mol_type = other RNA
acagacaagaaagtgcccatttg

SEQ ID NO: 1607 - RNA, 21 nt, synthetic construct
  source 1..21: mol_type = other RNA
gacaagcatttatactttctt

SEQ ID NO: 1608 - RNA, 23 nt, synthetic construct
  source 1..23: mol_type = other RNA
aagaaagtataaatgcttgtctc

SEQ ID NO: 1609 - RNA, 21 nt, synthetic construct
  source 1..21: mol_type = other RNA
acaagcatttatactttcttt

SEQ ID NO: 1610 - RNA, 23 nt, synthetic construct
  source 1..23: mol_type = other RNA
aaagaaagtataaatgcttgtct

SEQ ID NO: 1611 - RNA, 21 nt, synthetic construct
  source 1..21: mol_type = other RNA
  modified_base 1: mod_base = OTHER; note = 2'-O-methyl-adenosine-3'-thiophosphate-phosphate
  modified_base 2: mod_base = OTHER; note = 2'-O-methyl-cytidine-3'-thiophosphate-phosphate
  modified_base 3: mod_base = OTHER; note = 2'-O-methyl-cytidine-3'-phosphate
  modified_base 4: mod_base = OTHER; note = 2'-O-methyl-adenosine-3'-phosphate
  modified_base 5: mod_base = OTHER; note = 2'-O-methyl-guanosine-3'-phosphate
  modified_base 6: mod_base = OTHER; note = 2'-O-methyl-uridine-3'-phosphate
  modified_base 7: mod_base = OTHER; note = 2'-O-methyl-cytidine-3'-phosphate
  modified_base 8: mod_base = OTHER; note = 2'-O-methyl-guanosine-3'-phosphate
  modified_base 9: mod_base = OTHER; note = 2'-fluoro-uridine-3'-phosphate
  modified_base 10: mod_base = OTHER; note = 2'-fluoro-cytidine-3'-phosphate
  modified_base 11: mod_base = OTHER; note = 2'-fluoro-cytidine-3'-phosphate
  modified_base 12: mod_base = OTHER; note = 2'-O-methyl-cytidine-3'-phosphate
  modified_base 13: mod_base = OTHER; note = 2'-O-methyl-adenosine-3'-phosphate
  modified_base 14: mod_base = OTHER; note = 2'-O-methyl-guanosine-3'-phosphate
  modified_base 15: mod_base = OTHER; note = 2'-O-methyl-adenosine-3'-phosphate
  modified_base 16: mod_base = OTHER; note = 2'-O-methyl-adenosine-3'-phosphate
  modified_base 17: mod_base = OTHER; note = 2'-O-methyl-uridine-3'-phosphate
  modified_base 18: mod_base = OTHER; note = 2'-O-methyl-adenosine-3'-phosphate
  modified_base 19: mod_base = OTHER; note = 2'-O-methyl-adenosine-3'-phosphate
  modified_base 20: mod_base = OTHER; note = 2'-O-methyl-cytidine-3'-phosphate
  modified_base 21: mod_base = OTHER; note = 2'-O-methyl-uridine-3'-phosphate
accagtcgtcccagaataact

SEQ ID NO: 1612 - RNA, 23 nt, synthetic construct
  source 1..23: mol_type = other RNA
  modified_base 1: mod_base = OTHER; note = 2'-O-methyl-adenosine-3'-thiophosphate-phosphate
  modified_base 2: mod_base = OTHER; note = 2'-deoxy-guanosine-3'-thiophosphate-phosphate
  modified_base 3: mod_base = OTHER; note = 2'-O-methyl-uridine-3'-phosphate
  modified_base 4: mod_base = OTHER; note = 2'-O-methyl-uridine-3'-phosphate
  modified_base 5: mod_base = OTHER; note = 2'-deoxy-adenosine-3'-phosphate
  modified_base 6: mod_base = OTHER; note = 2'-O-methyl-uridine-3'-phosphate
  modified_base 7: mod_base = OTHER; note = 2'-deoxy-thymine-3'-phosphate
  modified_base 8: mod_base = OTHER; note = 2'-O-methyl-cytidine-3'-phosphate
  modified_base 9: mod_base = OTHER; note = 2'-O-methyl-uridine-3'-phosphate
  modified_base 10: mod_base = OTHER; note = 2'-O-methyl-guanosine-3'-phosphate
  modified_base 11: mod_base = OTHER; note = 2'-O-methyl-guanosine-3'-phosphate
  modified_base 12: mod_base = OTHER; note = 2'-deoxy-guanosine-3'-phosphate
  modified_base 13: mod_base = OTHER; note = 2'-O-methyl-adenosine-3'-phosphate
  modified_base 14: mod_base = OTHER; note = 2'-fluoro-cytidine-3'-phosphate
  modified_base 15: mod_base = OTHER; note = 2'-O-methyl-guanosine-3'-phosphate
  modified_base 16: mod_base = OTHER; note = 2'-O-methyl-adenosine-3'-phosphate
  modified_base 17: mod_base = OTHER; note = 2'-O-methyl-cytidine-3'-phosphate
  modified_base 18: mod_base = OTHER; note = 2'-O-methyl-uridine-3'-phosphate
  modified_base 19: mod_base = OTHER; note = 2'-O-methyl-guanosine-3'-phosphate
  modified_base 20: mod_base = OTHER; note = 2'-O-methyl-guanosine-3'-phosphate
  modified_base 21: mod_base = OTHER; note = 2'-O-methyl-uridine-3'-thiophosphate-phosphate
  modified_base 22: mod_base = OTHER; note = 2'-O-methyl-cytidine-3'-thiophosphate-phosphate
  modified_base 23: mod_base = OTHER; note = 2'-O-methyl-adenosine-3'-phosphate
agttattctgggacgactggtca

SEQ ID NO: 1613 - RNA, 21 nt, synthetic construct
  source 1..21: mol_type = other RNA
  modified_base 1: mod_base = OTHER; note = 2'-O-methyl-adenosine-3'-thiophosphate-phosphate
  modified_base 2: mod_base = OTHER; note = 2'-O-methyl-cytidine-3'-thiophosphate-phosphate
  modified_base 3: mod_base = OTHER; note = 2'-O-methyl-cytidine-3'-phosphate
  modified_base 4: mod_base = OTHER; note = 2'-O-methyl-adenosine-3'-phosphate
  modified_base 5: mod_base = OTHER; note = 2'-O-methyl-guanosine-3'-phosphate
  modified_base 6: mod_base = OTHER; note = 2'-O-methyl-uridine-3'-phosphate
  modified_base 7: mod_base = OTHER; note = 2'-O-methyl-cytidine-3'-phosphate
  modified_base 8: mod_base = OTHER; note = 2'-O-methyl-guanosine-3'-phosphate
  modified_base 9: mod_base = OTHER; note = 2'-fluoro-uridine-3'-phosphate
  modified_base 10: mod_base = OTHER; note = 2'-fluoro-cytidine-3'-phosphate
  modified_base 11: mod_base = OTHER; note = 2'-fluoro-cytidine-3'-phosphate
  modified_base 12: mod_base = OTHER; note = 2'-O-methyl-cytidine-3'-phosphate
  modified_base 13: mod_base = OTHER; note = 2'-O-methyl-adenosine-3'-phosphate
  modified_base 14: mod_base = OTHER; note = 2'-O-methyl-guanosine-3'-phosphate
  modified_base 15: mod_base = OTHER; note = 2'-O-methyl-adenosine-3'-phosphate
  modified_base 16: mod_base = OTHER; note = 2'-O-methyl-adenosine-3'-phosphate
  modified_base 17: mod_base = OTHER; note = 2'-O-methyl-uridine-3'-phosphate
  modified_base 18: mod_base = OTHER; note = 2'-O-methyl-adenosine-3'-phosphate
  modified_base 19: mod_base = OTHER; note = 2'-O-methyl-adenosine-3'-phosphate
  modified_base 20: mod_base = OTHER; note = 2'-O-methyl-cytidine-3'-phosphate
  modified_base 21: mod_base = OTHER; note = 2'-O-methyl-uridine-3'-phosphate
accagtcgtcccagaataact

SEQ ID NO: 1614 - RNA, 23 nt, synthetic construct
  source 1..23: mol_type = other RNA
  modified_base 1: mod_base = OTHER; note = 2'-O-methyl-adenosine-3'-thiophosphate-phosphate
  modified_base 2: mod_base = OTHER; note = 2'-deoxy-guanosine-3'-thiophosphate-phosphate
  modified_base 3: mod_base = OTHER; note = 2'-O-methyl-uridine-3'-phosphate
  modified_base 4: mod_base = OTHER; note = 2'-O-methyl-uridine-3'-phosphate
  modified_base 5: mod_base = OTHER; note = 2'-deoxy-adenosine-3'-phosphate
  modified_base 6: mod_base = OTHER; note = 2'-O-methyl-uridine-3'-phosphate
  modified_base 7: mod_base = OTHER; note = 2'-deoxy-thymine-3'-phosphate
  modified_base 8: mod_base = OTHER; note = 2'-O-methyl-cytidine-3'-phosphate
  modified_base 9: mod_base = OTHER; note = 2'-O-methyl-uridine-3'-phosphate
  modified_base 10: mod_base = OTHER; note = 2'-O-methyl-guanosine-3'-phosphate
  modified_base 11: mod_base = OTHER; note = 2'-O-methyl-guanosine-3'-phosphate
  modified_base 12: mod_base = OTHER; note = 2'-deoxy-guanosine-3'-phosphate
  modified_base 13: mod_base = OTHER; note = 2'-O-methyl-adenosine-3'-phosphate
  modified_base 14: mod_base = OTHER; note = 2'-fluoro-cytidine-3'-phosphate
  modified_base 15: mod_base = OTHER; note = 2'-O-methyl-guanosine-3'-phosphate
  modified_base 16: mod_base = OTHER; note = 2'-O-methyl-adenosine-3'-phosphate
  modified_base 17: mod_base = OTHER; note = 2'-O-methyl-cytidine-3'-phosphate
  modified_base 18: mod_base = OTHER; note = 2'-O-methyl-uridine-3'-phosphate
  modified_base 19: mod_base = OTHER; note = 2'-O-methyl-guanosine-3'-phosphate
  modified_base 20: mod_base = OTHER; note = 2'-O-methyl-guanosine-3'-phosphate
  modified_base 21: mod_base = OTHER; note = 2'-O-methyl-uridine-3'-thiophosphate-phosphate
  modified_base 22: mod_base = OTHER; note = 2'-O-methyl-cytidine-3'-thiophosphate-phosphate
  modified_base 23: mod_base = OTHER; note = 2'-O-methyl-uridine-3'-phosphate
agttattctgggacgactggtct

SEQ ID NO: 1615 - RNA, 21 nt, synthetic construct
  source 1..21: mol_type = other RNA
  modified_base 1: mod_base = OTHER; note = 2'-O-methyl-guanosine-3'-thiophosphate-phosphate
  modified_base 2: mod_base = OTHER; note = 2'-O-methyl-adenosine-3'-thiophosphate-phosphate
  modified_base 3: mod_base = OTHER; note = 2'-O-methyl-cytidine-3'-phosphate
  modified_base 4: mod_base = OTHER; note = 2'-O-methyl-adenosine-3'-phosphate
  modified_base 5: mod_base = OTHER; note = 2'-O-methyl-adenosine-3'-phosphate
  modified_base 6: mod_base = OTHER; note = 2'-O-methyl-guanosine-3'-phosphate
  modified_base 7: mod_base = OTHER; note = 2'-O-methyl-cytidine-3'-phosphate
  modified_base 8: mod_base = OTHER; note = 2'-O-methyl-adenosine-3'-phosphate
  modified_base 9: mod_base = OTHER; note = 2'-fluoro-uridine-3'-phosphate
  modified_base 10: mod_base = OTHER; note = 2'-fluoro-uridine-3'-phosphate
  modified_base 11: mod_base = OTHER; note = 2'-fluoro-uridine-3'-phosphate
  modified_base 12: mod_base = OTHER; note = 2'-O-methyl-adenosine-3'-phosphate
  modified_base 13: mod_base = OTHER; note = 2'-O-methyl-uridine-3'-phosphate
  modified_base 14: mod_base = OTHER; note = 2'-O-methyl-adenosine-3'-phosphate
  modified_base 15: mod_base = OTHER; note = 2'-O-methyl-cytidine-3'-phosphate
  modified_base 16: mod_base = OTHER; note = 2'-O-methyl-uridine-3'-phosphate
  modified_base 17: mod_base = OTHER; note = 2'-O-methyl-uridine-3'-phosphate
  modified_base 18: mod_base = OTHER; note = 2'-O-methyl-uridine-3'-phosphate
  modified_base 19: mod_base = OTHER; note = 2'-O-methyl-cytidine-3'-phosphate
  modified_base 20: mod_base = OTHER; note = 2'-O-methyl-uridine-3'-phosphate
  modified_base 21: mod_base = OTHER; note = 2'-O-methyl-uridine-3'-phosphate
gacaagcatttatactttctt

SEQ ID NO: 1616 - RNA, 23 nt, synthetic construct
  source 1..23: mol_type = other RNA
  modified_base 1: mod_base = OTHER; note = 2'-O-methyl-adenosine-3'-thiophosphate-phosphate
  modified_base 2: mod_base = OTHER; note = 2'-deoxy-adenosine-3'-thiophosphate-phosphate
  modified_base 3: mod_base = OTHER; note = 2'-O-methyl-guanosine-3'-phosphate
  modified_base 4: mod_base = OTHER; note = 2'-O-methyl-adenosine-3'-phosphate
  modified_base 5: mod_base = OTHER; note = 2'-deoxy-adenosine-3'-phosphate
  modified_base 6: mod_base = OTHER; note = 2'-O-methyl-adenosine-3'-phosphate
  modified_base 7: mod_base = OTHER; note = 2'-deoxy-guanosine-3'-phosphate
  modified_base 8: mod_base = OTHER; note = 2'-O-methyl-uridine-3'-phosphate
  modified_base 9: mod_base = OTHER; note = 2'-O-methyl-adenosine-3'-phosphate
  modified_base 10: mod_base = OTHER; note = 2'-O-methyl-uridine-3'-phosphate
  modified_base 11: mod_base = OTHER; note = 2'-O-methyl-adenosine-3'-phosphate
  modified_base 12: mod_base = OTHER; note = 2'-deoxy-adenosine-3'-phosphate
  modified_base 13: mod_base = OTHER; note = 2'-O-methyl-adenosine-3'-phosphate
  modified_base 14: mod_base = OTHER; note = 2'-fluoro-uridine-3'-phosphate
  modified_base 15: mod_base = OTHER; note = 2'-O-methyl-guanosine-3'-phosphate
  modified_base 16: mod_base = OTHER; note = 2'-O-methyl-cytidine-3'-phosphate
  modified_base 17: mod_base = OTHER; note = 2'-O-methyl-uridine-3'-phosphate
  modified_base 18: mod_base = OTHER; note = 2'-O-methyl-uridine-3'-phosphate
  modified_base 19: mod_base = OTHER; note = 2'-O-methyl-guanosine-3'-phosphate
  modified_base 20: mod_base = OTHER; note = 2'-O-methyl-uridine-3'-phosphate
  modified_base 21: mod_base = OTHER; note = 2'-O-methyl-cytidine-3'-thiophosphate-phosphate
  modified_base 22: mod_base = OTHER; note = 2'-O-methyl-uridine-3'-thiophosphate-phosphate
  modified_base 23: mod_base = OTHER; note = 2'-O-methyl-cytidine-3'-phosphate
aagaaagtataaatgcttgtctc

SEQ ID NO: 1617 - RNA, 21 nt, synthetic construct
  source 1..21: mol_type = other RNA
  modified_base 1: mod_base = OTHER; note = 2'-O-methyl-adenosine-3'-thiophosphate-phosphate
  modified_base 2: mod_base = OTHER; note = 2'-fluoro-adenosine-3'-thiophosphate-phosphate
  modified_base 3: mod_base = OTHER; note = 2'-O-methyl-uridine-3'-phosphate
  modified_base 4: mod_base = OTHER; note = 2'-fluoro-uridine-3'-phosphate
  modified_base 5: mod_base = OTHER; note = 2'-O-methyl-cytidine-3'-phosphate
  modified_base 6: mod_base = OTHER; note = 2'-fluoro-uridine-3'-phosphate
  modified_base 7: mod_base = OTHER; note = 2'-O-methyl-cytidine-3'-phosphate
  modified_base 8: mod_base = OTHER; note = 2'-fluoro-cytidine-3'-phosphate
  modified_base 9: mod_base = OTHER; note = 2'-O-methyl-guanosine-3'-phosphate
  modified_base 10: mod_base = OTHER; note = 2'-O-methyl-adenosine-3'-phosphate
  modified_base 11: mod_base = OTHER; note = 2'-O-methyl-adenosine-3'-phosphate
  modified_base 12: mod_base = OTHER; note = 2'-fluoro-cytidine-3'-phosphate
  modified_base 13: mod_base = OTHER; note = 2'-O-methyl-guanosine-3'-phosphate
  modified_base 14: mod_base = OTHER; note = 2'-fluoro-uridine-3'-phosphate
  modified_base 15: mod_base = OTHER; note = 2'-O-methyl-guanosine-3'-phosphate
  modified_base 16: mod_base = OTHER; note = 2'-fluoro-uridine-3'-phosphate
  modified_base 17: mod_base = OTHER; note = 2'-O-methyl-cytidine-3'-phosphate
  modified_base 18: mod_base = OTHER; note = 2'-fluoro-adenosine-3'-phosphate
  modified_base 19: mod_base = OTHER; note = 2'-O-methyl-cytidine-3'-thiophosphate-phosphate
  modified_base 20: mod_base = OTHER; note = 2'-O-methyl-guanosine-3'-thiophosphate-phosphate
  modified_base 21: mod_base = OTHER; note = 2'-O-methyl-uridine-3'-phosphate
aattctccgaacgtgtcacgt

SEQ ID NO: 1618 - RNA, 19 nt, synthetic construct
  source 1..19: mol_type = other RNA
  modified_base 1: mod_base = OTHER; note = 2'-O-methyl-adenosine-3'-thiophosphate-phosphate
  modified_base 2: mod_base = OTHER; note = 2'-O-methyl-cytidine-3'-thiophosphate-phosphate
  modified_base 3: mod_base = OTHER; note = 2'-O-methyl-guanosine-3'-phosphate
  modified_base 4: mod_base = OTHER; note = 2'-O-methyl-uridine-3'-phosphate
  modified_base 5: mod_base = OTHER; note = 2'-fluoro-guanosine-3'-phosphate
  modified_base 6: mod_base = OTHER; note = 2'-fluoro-adenosine-3'-phosphate
  modified_base 7: mod_base = OTHER; note = 2'-fluoro-cytidine-3'-phosphate
  modified_base 8: mod_base = OTHER; note = 2'-fluoro-adenosine-3'-phosphate
  modified_base 9: mod_base = OTHER; note = 2'-fluoro-cytidine-3'-phosphate
  modified_base 10: mod_base = OTHER; note = 2'-fluoro-guanosine-3'-phosphate
  modified_base 11: mod_base = OTHER; note = 2'-O-methyl-uridine-3'-phosphate
  modified_base 12: mod_base = OTHER; note = 2'-O-methyl-uridine-3'-phosphate
  modified_base 13: mod_base = OTHER; note = 2'-O-methyl-cytidine-3'-phosphate
  modified_base 14: mod_base = OTHER; note = 2'-O-methyl-guanosine-3'-phosphate
  modified_base 15: mod_base = OTHER; note = 2'-O-methyl-guanosine-3'-phosphate
  modified_base 16: mod_base = OTHER; note = 2'-O-methyl-adenosine-3'-phosphate
  modified_base 17: mod_base = OTHER; note = 2'-O-methyl-guanosine-3'-phosphate
  modified_base 18: mod_base = OTHER; note = 2'-O-methyl-adenosine-3'-phosphate
  modified_base 19: mod_base = OTHER; note = 2'-O-methyl-adenosine-3'-phosphate
acgtgacacgttcggagaa

SEQ ID NO: 1619 - RNA, 2460 nt, Homo sapiens
  source 1..2460: mol_type = mRNA
agtagccagacatgagctgtgagggtcaagcacagctatccatcagatgatctactttcagccttcctgagtcccagacaatagaagacaggtggctgtacccttggccaagggtaggtgtggcagtggtgtctgctgtcactgtgccctcattggcccccagcaatcagactcaacagacggagcaactgccatccgaggctcctgaaccagggccattcaccaggagcatgcggctccctgatgtccagctctggctggtgctgctgtgggcactggtgcgagcacaggggacagggtctgtgtgtccctcctgtgggggctccaaactggcaccccaagcagaacgagctctggtgctggagctagccaagcagcaaatcctggatgggttgcacctgaccagtcgtcccagaataactcatcctccaccccaggcagcgctgaccagagccctccggagactacagccagggagtgtggctccagggaatggggaggaggtcatcagctttgctactgtcacagactccacttcagcctacagctccctgctcacttttcacctgtccactcctcggtcccaccacctgtaccatgcccgcctgtggctgcacgtgctccccacccttcctggcactctttgcttgaggatcttccgatggggaccaaggaggaggcgccaagggtcccgcactctcctggctgagcaccacatcaccaacctgggctggcataccttaactctgccctctagtggcttgaggggtgagaagtctggtgtcctgaaactgcaactagactgcagacccctagaaggcaacagcacagttactggacaaccgaggcggctcttggacacagcaggacaccagcagcccttcctagagcttaagatccgagccaatgagcctggagcaggccgggccaggaggaggacccccacctgtgagcctgcgacccccttatgttgcaggcgagaccattacgtagacttccaggaactgggatggcgggactggatactgcagcccgaggggtaccagctgaattactgcagtgggcagtgccctccccacctggctggcagcccaggcattgctgcctctttccattctgccgtcttcagcctcctcaaagccaacaatccttggcctgccagtacctcctgttgtgtccctactgcccgaaggcccctctctctcctctacctggatcataatggcaatgtggtcaagacggatgtgccagatatggtggtggaggcctgtggctgcagctagcaagaggacctggggctttggagtgaagagaccaagatgaagtttcccaggcacagggcatctgtgactggaggcatcagattcctgatccacaccccaacccaacaaccacctggcaatatgactcacttgacccctatgggacccaaatgggcactttcttgtctgagactctggcttattccaggttggctgatgtgttgggagatgggtaaagcgtttcttctaaaggggtctacccagaaagcatgatttcctgccctaagtcctgtgagaagatgtcagggactagggagggagggagggaaggcagagaaaaattacttagcctctcccaagatgagaaagtcctcaagtgaggggaggaggaagcagatagatggtccagcaggcttgaagcagggtaagcaggctggcccagggtaagggctgttgaggtaccttaagggaaggtcaagagggagatgggcaaggcgctgagggaggatgcttaggggacccccagaaacaggagtcaggaaaatgaggcactaagcctaagaagttccctggtttttcccaggggacaggacccactgggagacaagcatttatactttctttcttcttttttatttttttgagatcgagtctcgctctgtcaccaggctggagtgcagtgacacgatcttggctcactgcaacctccgtctcctgggttcaagtgattcttctgcctcagcctcccgagcagctgggattacaggcgcccactaatttttgtattcttagtagaaacgaggtttcaacatgttggccaggatggtctcaatctcttgacctcttgatccacccgacttggcctcccgaagtgatgagattataggcgtgagccaccgcgcctggcttatactttcttaataaaaaggagaaagaaaatcaacaaatgtgagtcataaagaagggttagggtgatggtccagagcaacagttcttcaagtgtactctgtaggcttctgggaggtcccttttcaggggtgtccacaaagtcaaagctattttcataataatactaacatgttatttgccttttgaattctcattatcttaaaattgtattgtggagttttccagaggccgtgtgacatgtgattacatcatctttctgacatcattgttaatggaatgtgtgcttgta

SEQ ID NO: 1620 - RNA, 2498 nt, Macaca fascicularis
  source 1..2498: mol_type = mRNA
aaagaggccccaggtcagtagccagacatgagctgtgagggtcaagcacagctatccatcagatgatctactttcagccttcctgagtcccaggcaatagaagacaggtggctctacccttggccaagggtgggtgtggcagtggtgtctgctgtcactgtgccttcattggcccccagcaatctgactcaacagacggagcaactgccatccgaggctcccgaaccagggccattcatcaggagcatggggctccctgttgtccagctctggctggtgctgctgtggacactggtgcgggcacaggggacagggtctgtgtgtccctcctgtgggggctccaaactggcaccccaagcagaacgagctctggtgctggagctagccaagcagcaaatcctggaggggttgcatctgaccagtcgtcccagaataactcatcctccaccccaggcagcgctgaccagagccctccggagactacagccggggagtgtggctccagggaatggggaggaggtcatcagctttgctactgtcacagactccacttcagcctacagctccctgcttacctttcacctgtccactcctcggtcccatcacctgtaccatgcccgcctgtggctgcacatgctccccacccttcctggcactctttgcttgaggatcttccgatggggaccaaggaggaggcaccaaaggtcccgcacccttttggctgagcaccacatcaccaacctgggctggcatgccttaactctgccctctagtggcttgaggggtgagaagtctggtgtcctgaaactgcaactagactgcagacccctagaaggcaacaacagcacagttactggacaaccaaggcggctcctggacacagcaggacaccagcagcccttcctagagcttaagatccgagccaatgagcctggagcaggtcgggccaggaggaggacccccacctgtgagcctgcaacccccttatgttgcaggcgagatcattacgtagacttccaggaactgggatggcaagactggatactgcagcccgaggggtaccagctgaattactgcagtgggcagtgccctccccacctggctggcagcccgggcattgctgcctctttccattctgccgtcttcagcctcctcaaagccaacaatccttggcctgccagtacctcctgctgtgtccctactgcccgaaggcccctttctctcctctacctggatcataatggcaatgtggtcaagacggatgtgccagatatggtggtggaggcctgtggctgcagctagcaagaggacctggggctttggagtgaagagaccaagatgaagtttcccaggcacagggcatctgcggctggaggcatcagattcctgacccacaccccaacccaacaaccacctggcaatatgactcacttgacccctatggaacccaaatgggcactttcttgtctgagactctggcttgttccaggttggctgatgtgttggcagatgggtaaagcatttgttctaaaggggtctactcagaaagcatgattttcctgccctaagtcctgtaagatgtcagggactagggagggagggagggaaggcagagaaaaattagcctctcccaagatgagaaagtccttaagtgaggggaggaggaagcagatagatggtccagcaggcttgaagcagggtaagcaggctggcccaaggtaaggcctgttgaagcgtcttaagggagggtcaagagggagatgggcaagatgctgagggaggatgcttagaggacccccagaaacaggagtcaggaaagagaggtactaagcctaagaagttccctggtttttcccaggggacaggacccactgggagacaagcatttatactttcttttttcttttctttttcctttctttttttttttttttttttttttgagacggagtctcgctctgtcatcaggctagagtgcagtggcacgatctcggctcactgcaaactccgcctcccagtttcaagtgattctcctgcctcagccttctgagtacctgggattacaggtgcccactaatttttgtattcttagtagagacgaggtttcaacatgttcgccaggatggtctcgatctcttgacctcgtgatccacccgacttagcctcccaaagtgctgggattacaggcctgagccaccgcgcctggcttatactttcttaataaaaaggagaaagaaaatcaataaatgtgactcataaagaagggttcaggtgatggtccggagcaacagttctccaagtgtgttccgtaggcttctgggaggtccctcttcaggggtgtccacaaagtcaaaactattttcataataatactaacatgttatttgccttttgaattctcattatcttaaaattgtacagtggagttttccagaagctgtgtgacatgtgattacatcatctttctgacatcattgttaatggaatgtgtgcttgta

SEQ ID NO: 1621 - RNA, 15 nt, synthetic construct
  source 1..15: mol_type = other RNA
gggtcaagcacagct

SEQ ID NO: 1622 - RNA, 15 nt, synthetic construct
  source 1..15: mol_type = other RNA
aagcacagctatcca

SEQ ID NO: 1623 - RNA, 15 nt, synthetic construct
  source 1..15: mol_type = other RNA
cagctatccatcaga

SEQ ID NO: 1624 - RNA, 15 nt, synthetic construct
  source 1..15: mol_type = other RNA
atccatcagatgatc

SEQ ID NO: 1625 - RNA, 15 nt, synthetic construct
  source 1..15: mol_type = other RNA
tcagatgatctactt

SEQ ID NO: 1626 - RNA, 15 nt, synthetic construct
  source 1..15: mol_type = other RNA
tgatctactttcagc

SEQ ID NO: 1627 - RNA, 15 nt, synthetic construct
  source 1..15: mol_type = other RNA
tgagtcccagacaat

SEQ ID NO: 1628 - RNA, 15 nt, synthetic construct
  source 1..15: mol_type = other RNA
agccaagcagcaaat

SEQ ID NO: 1629 - RNA, 15 nt, synthetic construct
  source 1..15: mol_type = other RNA
gtcgtcccagaataa

SEQ ID NO: 1630 - RNA, 15 nt, synthetic construct
  source 1..15: mol_type = other RNA
atcagctttgctact

SEQ ID NO: 1631 - RNA, 15 nt, synthetic construct
  source 1..15: mol_type = other RNA
tgctactgtcacaga

SEQ ID NO: 1632 - RNA, 15 nt, synthetic construct
  source 1..15: mol_type = other RNA
ttcctggcactcttt

SEQ ID NO: 1633 - RNA, 15 nt, synthetic construct
  source 1..15: mol_type = other RNA
tctttgcttgaggat

SEQ ID NO: 1634 - RNA, 15 nt, synthetic construct
  source 1..15: mol_type = other RNA
tggtgtcctgaaact

SEQ ID NO: 1635 - RNA, 15 nt, synthetic construct
  source 1..15: mol_type = other RNA
cctgaaactgcaact

SEQ ID NO: 1636 - RNA, 15 nt, synthetic construct
  source 1..15: mol_type = other RNA
aggcaacagcacagt

SEQ ID NO: 1637 - RNA, 15 nt, synthetic construct
  source 1..15: mol_type = other RNA
cctagagcttaagat

SEQ ID NO: 1638 - RNA, 15 nt, synthetic construct
  source 1..15: mol_type = other RNA
cttaagatccgagcc

SEQ ID NO: 1639 - RNA, 15 nt, synthetic construct
  source 1..15: mol_type = other RNA
accattacgtagact

SEQ ID NO: 1640 - RNA, 15 nt, synthetic construct
  source 1..15: mol_type = other RNA
ctcaaagccaacaat

SEQ ID NO: 1641 - RNA, 15 nt, synthetic construct
  source 1..15: mol_type = other RNA
ctctacctggatcat

SEQ ID NO: 1642 - RNA, 15 nt, synthetic construct
  source 1..15: mol_type = other RNA
gatcataatggcaat

SEQ ID NO: 1643 - RNA, 15 nt, synthetic construct
  source 1..15: mol_type = other RNA
aagagaccaagatga

SEQ ID NO: 1644 - RNA, 15 nt, synthetic construct
  source 1..15: mol_type = other RNA
ctggcaatatgactc

SEQ ID NO: 1645 - RNA, 15 nt, synthetic construct
  source 1..15: mol_type = other RNA
tgggcactttcttgt

SEQ ID NO: 1646 - RNA, 15 nt, synthetic construct
  source 1..15: mol_type = other RNA
ttcttgtctgagact

SEQ ID NO: 1647 - RNA, 15 nt, synthetic construct
  source 1..15: mol_type = other RNA
tgagactctggctta

SEQ ID NO: 1648 - RNA, 15 nt, synthetic construct
  source 1..15: mol_type = other RNA
ttgggagatgggtaa

SEQ ID NO: 1649 - RNA, 15 nt, synthetic construct
  source 1..15: mol_type = other RNA
gatgggtaaagcgtt

SEQ ID NO: 1650 - RNA, 15 nt, synthetic construct
  source 1..15: mol_type = other RNA
aaagcgtttcttcta

SEQ ID NO: 1651 - RNA, 15 nt, synthetic construct
  source 1..15: mol_type = other RNA
cttctaaaggggtct

SEQ ID NO: 1652 - RNA, 15 nt, synthetic construct
  source 1..15: mol_type = other RNA
tacccagaaagcatg

SEQ ID NO: 1653 - RNA, 15 nt, synthetic construct
  source 1..15: mol_type = other RNA
aagtcctgtgagaag

SEQ ID NO: 1654 - RNA, 15 nt, synthetic construct
  source 1..15: mol_type = other RNA
gaaggcagagaaaaa

SEQ ID NO: 1655 - RNA, 15 nt, synthetic construct
  source 1..15: mol_type = other RNA
cagagaaaaattact

SEQ ID NO: 1656 - RNA, 15 nt, synthetic construct
  source 1..15: mol_type = other RNA
tcccaagatgagaaa

SEQ ID NO: 1657 - RNA, 15 nt, synthetic construct
  source 1..15: mol_type = other RNA
gaggaagcagataga

SEQ ID NO: 1658 - RNA, 15 nt, synthetic construct
  source 1..15: mol_type = other RNA
ctgttgaggtacctt

SEQ ID NO: 1659 - RNA, 15 nt, synthetic construct
  source 1..15: mol_type = other RNA
aggtaccttaaggga

SEQ ID NO: 1660 - RNA, 15 nt, synthetic construct
  source 1..15: mol_type = other RNA
caggagtcaggaaaa

SEQ ID NO: 1661 - RNA, 15 nt, synthetic construct
  source 1..15: mol_type = other RNA
gggagacaagcattt

SEQ ID NO: 1662 - RNA, 15 nt, synthetic construct
  source 1..15: mol_type = other RNA
acaagcatttatact

SEQ ID NO: 1663 - RNA, 15 nt, synthetic construct
  source 1..15: mol_type = other RNA
catttatactttctt

SEQ ID NO: 1664 - RNA, 15 nt, synthetic construct
  source 1..15: mol_type = other RNA
aaagaaaatcaacaa

SEQ ID NO: 1665 - RNA, 15 nt, synthetic construct
  source 1..15: mol_type = other RNA
caaatgtgagtcata

SEQ ID NO: 1666 - RNA, 15 nt, synthetic construct
  source 1..15: mol_type = other RNA
gtcataaagaagggt

SEQ ID NO: 1667 - RNA, 15 nt, synthetic construct
  source 1..15: mol_type = other RNA
agagcaacagttctt

SEQ ID NO: 1668 - RNA, 15 nt, synthetic construct
  source 1..15: mol_type = other RNA
gggtgtccacaaagt

SEQ ID NO: 1669 - RNA, 15 nt, synthetic construct
  source 1..15: mol_type = other RNA
tccacaaagtcaaag

SEQ ID NO: 1670 - RNA, 15 nt, synthetic construct
  source 1..15: mol_type = other RNA
aaagtcaaagctatt

SEQ ID NO: 1671 - RNA, 15 nt, synthetic construct
  source 1..15: mol_type = other RNA
aaagctattttcata

SEQ ID NO: 1672 - RNA, 15 nt, synthetic construct
  source 1..15: mol_type = other RNA
attttcataataata

SEQ ID NO: 1673 - RNA, 15 nt, synthetic construct
  source 1..15: mol_type = other RNA
ataatactaacatgt

SEQ ID NO: 1674 - RNA, 15 nt, synthetic construct
  source 1..15: mol_type = other RNA
actaacatgttattt

SEQ ID NO: 1675 - RNA, 15 nt, synthetic construct
  source 1..15: mol_type = other RNA
atgttatttgccttt

SEQ ID NO: 1676 - RNA, 15 nt, synthetic construct
  source 1..15: mol_type = other RNA
atttgccttttgaat

SEQ ID NO: 1677 - RNA, 15 nt, synthetic construct
  source 1..15: mol_type = other RNA
ttttgaattctcatt

SEQ ID NO: 1678 - RNA, 15 nt, synthetic construct
  source 1..15: mol_type = other RNA
ttctcattatcttaa

SEQ ID NO: 1679 - RNA, 15 nt, synthetic construct
  source 1..15: mol_type = other RNA
ttatcttaaaattgt

SEQ ID NO: 1680 - RNA, 15 nt, synthetic construct
  source 1..15: mol_type = other RNA
gtgtgacatgtgatt

SEQ ID NO: 1681 - RNA, 15 nt, synthetic construct
  source 1..15: mol_type = other RNA
atgtgattacatcat

SEQ ID NO: 1682 - RNA, 15 nt, synthetic construct
  source 1..15: mol_type = other RNA
ttacatcatctttct

SEQ ID NO: 1683 - RNA, 15 nt, synthetic construct
  source 1..15: mol_type = other RNA
atctttctgacatca

SEQ ID NO: 1684 - RNA, 15 nt, synthetic construct
  source 1..15: mol_type = other RNA
tctgacatcattgtt

SEQ ID NO: 1685 - RNA, 15 nt, synthetic construct
  source 1..15: mol_type = other RNA
gttaatggaatgtgt

SEQ ID NO: 1686 - RNA, 15 nt, synthetic construct
  source 1..15: mol_type = other RNA
cagctttgctactgt

SEQ ID NO: 1687 - RNA, 15 nt, synthetic construct
  source 1..15: mol_type = other RNA
agactctggcttatt

SEQ ID NO: 1688 - RNA, 15 nt, synthetic construct
  source 1..15: mol_type = other RNA
gcaacagttcttcaa

SEQ ID NO: 1689 - RNA, 15 nt, synthetic construct
  source 1..15: mol_type = other RNA
aaagctattttcata

SEQ ID NO: 1690 - RNA, 15 nt, synthetic construct
  source 1..15: mol_type = other RNA
agctgtgcttgaccc

SEQ ID NO: 1691 - RNA, 15 nt, synthetic construct
  source 1..15: mol_type = other RNA
tggatagctgtgctt

SEQ ID NO: 1692 - RNA, 15 nt, synthetic construct
  source 1..15: mol_type = other RNA
tctgatggatagctg

SEQ ID NO: 1693 - RNA, 15 nt, synthetic construct
  source 1..15: mol_type = other RNA
gatcatctgatggat

SEQ ID NO: 1694 - RNA, 15 nt, synthetic construct
  source 1..15: mol_type = other RNA
aagtagatcatctga

SEQ ID NO: 1695 - RNA, 15 nt, synthetic construct
  source 1..15: mol_type = other RNA
aagtagatcatctga

SEQ ID NO: 1696 - RNA, 15 nt, synthetic construct
  source 1..15: mol_type = other RNA
attgtctgggactca

SEQ ID NO: 1697 - RNA, 15 nt, synthetic construct
  source 1..15: mol_type = other RNA
atttgctgcttggct

SEQ ID NO: 1698 - RNA, 15 nt, synthetic construct
  source 1..15: mol_type = other RNA
ttattctgggacgac

SEQ ID NO: 1699 - RNA, 15 nt, synthetic construct
  source 1..15: mol_type = other RNA
agtagcaaagctgat

SEQ ID NO: 1700 - RNA, 15 nt, synthetic construct
  source 1..15: mol_type = other RNA
tctgtgacagtagca

SEQ ID NO: 1701 - RNA, 15 nt, synthetic construct
  source 1..15: mol_type = other RNA
tctgtgacagtagca

SEQ ID NO: 1702 - RNA, 15 nt, synthetic construct
  source 1..15: mol_type = other RNA
atcctcaagcaaaga

SEQ ID NO: 1703 - RNA, 15 nt, synthetic construct
  source 1..15: mol_type = other RNA
agtttcaggacacca

SEQ ID NO: 1704 - RNA, 15 nt, synthetic construct
  source 1..15: mol_type = other RNA
agttgcagtttcagg

SEQ ID NO: 1705 - RNA, 15 nt, synthetic construct
  source 1..15: mol_type = other RNA
actgtgctgttgcct

SEQ ID NO: 1706 - RNA, 15 nt, synthetic construct
  source 1..15: mol_type = other RNA
atcttaagctctagg

SEQ ID NO: 1707 - RNA, 15 nt, synthetic construct
  source 1..15: mol_type = other RNA
ggctcggatcttaag

SEQ ID NO: 1708 - RNA, 15 nt, synthetic construct
  source 1..15: mol_type = other RNA
agtctacgtaatggt

SEQ ID NO: 1709 - RNA, 15 nt, synthetic construct
  source 1..15: mol_type = other RNA
attgttggctttgag

SEQ ID NO: 1710 - RNA, 15 nt, synthetic construct
  source 1..15: mol_type = other RNA
atgatccaggtagag

SEQ ID NO: 1711 - RNA, 15 nt, synthetic construct
  source 1..15: mol_type = other RNA
attgccattatgatc

SEQ ID NO: 1712 - RNA, 15 nt, synthetic construct
  source 1..15: mol_type = other RNA
tcatcttggtctctt

SEQ ID NO: 1713 - RNA, 15 nt, synthetic construct
  source 1..15: mol_type = other RNA
agtcatattgccagg

SEQ ID NO: 1714 - RNA, 15 nt, synthetic construct
  source 1..15: mol_type = other RNA
acaagaaagtgccca

SEQ ID NO: 1715 - RNA, 15 nt, synthetic construct
  source 1..15: mol_type = other RNA
agtctcagacaagaa

SEQ ID NO: 1716 - RNA, 15 nt, synthetic construct
  source 1..15: mol_type = other RNA
taagccagagtctca

SEQ ID NO: 1717 - RNA, 15 nt, synthetic construct
  source 1..15: mol_type = other RNA
ttacccatctcccaa

SEQ ID NO: 1718 - RNA, 15 nt, synthetic construct
  source 1..15: mol_type = other RNA
aacgctttacccatc

SEQ ID NO: 1719 - RNA, 15 nt, synthetic construct
  source 1..15: mol_type = other RNA
tagaagaaacgcttt

SEQ ID NO: 1720 - RNA, 15 nt, synthetic construct
  source 1..15: mol_type = other RNA
agacccctttagaag

SEQ ID NO: 1721 - RNA, 15 nt, synthetic construct
  source 1..15: mol_type = other RNA
catgctttctgggta

SEQ ID NO: 1722 - RNA, 15 nt, synthetic construct
  source 1..15: mol_type = other RNA
cttctcacaggactt

SEQ ID NO: 1723 - RNA, 15 nt, synthetic construct
  source 1..15: mol_type = other RNA
tttttctctgccttc

SEQ ID NO: 1724 - RNA, 15 nt, synthetic construct
  source 1..15: mol_type = other RNA
agtaatttttctctg

SEQ ID NO: 1725 - RNA, 15 nt, synthetic construct
  source 1..15: mol_type = other RNA
tttctcatcttggga

SEQ ID NO: 1726 - RNA, 15 nt, synthetic construct
  source 1..15: mol_type = other RNA
tctatctgcttcctc

SEQ ID NO: 1727 - RNA, 15 nt, synthetic construct
  source 1..15: mol_type = other RNA
aaggtacctcaacag

SEQ ID NO: 1728 - RNA, 15 nt, synthetic construct
  source 1..15: mol_type = other RNA
tcccttaaggtacct

SEQ ID NO: 1729 - RNA, 15 nt, synthetic construct
  source 1..15: mol_type = other RNA
ttttcctgactcctg

SEQ ID NO: 1730 - RNA, 15 nt, synthetic construct
  source 1..15: mol_type = other RNA
aaatgcttgtctccc

SEQ ID NO: 1731 - RNA, 15 nt, synthetic construct
  source 1..15: mol_type = other RNA
agtataaatgcttgt

SEQ ID NO: 1732 - RNA, 15 nt, synthetic construct
  source 1..15: mol_type = other RNA
aagaaagtataaatg

SEQ ID NO: 1733 - RNA, 15 nt, synthetic construct
  source 1..15: mol_type = other RNA
ttgttgattttcttt

SEQ ID NO: 1734 - RNA, 15 nt, synthetic construct
  source 1..15: mol_type = other RNA
tatgactcacatttg

SEQ ID NO: 1735 - RNA, 15 nt, synthetic construct
  source 1..15: mol_type = other RNA
acccttctttatgac

SEQ ID NO: 1736 - RNA, 15 nt, synthetic construct
  source 1..15: mol_type = other RNA
aagaactgttgctct

SEQ ID NO: 1737 - RNA, 15 nt, synthetic construct
  source 1..15: mol_type = other RNA
actttgtggacaccc

SEQ ID NO: 1738 - RNA, 15 nt, synthetic construct
  source 1..15: mol_type = other RNA
ctttgactttgtgga

SEQ ID NO: 1739 - RNA, 15 nt, synthetic construct
  source 1..15: mol_type = other RNA
aatagctttgacttt

SEQ ID NO: 1740 - RNA, 15 nt, synthetic construct
  source 1..15: mol_type = other RNA
tatgaaaatagcttt

SEQ ID NO: 1741 - RNA, 15 nt, synthetic construct
  source 1..15: mol_type = other RNA
tattattatgaaaat

SEQ ID NO: 1742 - RNA, 15 nt, synthetic construct
  source 1..15: mol_type = other RNA
acatgttagtattat

SEQ ID NO: 1743 - RNA, 15 nt, synthetic construct
  source 1..15: mol_type = other RNA
aaataacatgttagt

SEQ ID NO: 1744 - RNA, 15 nt, synthetic construct
  source 1..15: mol_type = other RNA
aaaggcaaataacat

SEQ ID NO: 1745 - RNA, 15 nt, synthetic construct
  source 1..15: mol_type = other RNA
attcaaaaggcaaat

SEQ ID NO: 1746 - RNA, 15 nt, synthetic construct
  source 1..15: mol_type = other RNA
aatgagaattcaaaa

SEQ ID NO: 1747 - RNA, 15 nt, synthetic construct
  source 1..15: mol_type = other RNA
ttaagataatgagaa

SEQ ID NO: 1748 - RNA, 15 nt, synthetic construct
  source 1..15: mol_type = other RNA
acaattttaagataa

SEQ ID NO: 1749 - RNA, 15 nt, synthetic construct
  source 1..15: mol_type = other RNA
aatcacatgtcacac

SEQ ID NO: 1750 - RNA, 15 nt, synthetic construct
  source 1..15: mol_type = other RNA
atgatgtaatcacat

SEQ ID NO: 1751 - RNA, 15 nt, synthetic construct
  source 1..15: mol_type = other RNA
agaaagatgatgtaa

SEQ ID NO: 1752 - RNA, 15 nt, synthetic construct
  source 1..15: mol_type = other RNA
tgatgtcagaaagat

SEQ ID NO: 1753 - RNA, 15 nt, synthetic construct
  source 1..15: mol_type = other RNA
aacaatgatgtcaga

SEQ ID NO: 1754 - RNA, 15 nt, synthetic construct
  source 1..15: mol_type = other RNA
acacattccattaac

SEQ ID NO: 1755 - RNA, 15 nt, synthetic construct
  source 1..15: mol_type = other RNA
acagtagcaaagctg

SEQ ID NO: 1756 - RNA, 15 nt, synthetic construct
  source 1..15: mol_type = other RNA
aataagccagagtct

SEQ ID NO: 1757 - RNA, 15 nt, synthetic construct
  source 1..15: mol_type = other RNA
ttgaagaactgttgc

SEQ ID NO: 1758 - RNA, 15 nt, synthetic construct
  source 1..15: mol_type = other RNA
tatgaaaatagcttt

SEQ ID NO: 1759 - RNA, 19 nt, synthetic construct
  source 1..19: mol_type = other RNA
  modified_base 1: mod_base = OTHER; note = 2'-O-methyl-cytidine-3'-thiophosphate-phosphate
  modified_base 2: mod_base = OTHER; note = 2'-O-methyl-adenosine-3'-thiophosphate-phosphate
  modified_base 3: mod_base = OTHER; note = 2'-O-methyl-uridine-3'-phosphate
  modified_base 4: mod_base = OTHER; note = 2'-O-methyl-guanosine-3'-phosphate
  modified_base 5: mod_base = OTHER; note = 2'-O-methyl-uridine-3'-phosphate
  modified_base 6: mod_base = OTHER; note = 2'-O-methyl-uridine-3'-phosphate
  modified_base 7: mod_base = OTHER; note = 2'-fluoro-adenosine-3'-phosphate
  modified_base 8: mod_base = OTHER; note = 2'-fluoro-uridine-3'-phosphate
  modified_base 9: mod_base = OTHER; note = 2'-fluoro-uridine-3'-phosphate
  modified_base 10: mod_base = OTHER; note = 2'-O-methyl-uridine-3'-phosphate
  modified_base 11: mod_base = OTHER; note = 2'-O-methyl-guanosine-3'-phosphate
  modified_base 12: mod_base = OTHER; note = 2'-O-methyl-cytidine-3'-phosphate
  modified_base 13: mod_base = OTHER; note = 2'-O-methyl-cytidine-3'-phosphate
  modified_base 14: mod_base = OTHER; note = 2'-O-methyl-uridine-3'-phosphate
  modified_base 15: mod_base = OTHER; note = 2'-O-methyl-uridine-3'-phosphate
  modified_base 16: mod_base = OTHER; note = 2'-O-methyl-uridine-3'-phosphate
  modified_base 17: mod_base = OTHER; note = 2'-O-methyl-uridine-3'-thiophosphate-phosphate
  modified_base 18: mod_base = OTHER; note = 2'-O-methyl-guanosine-3'-thiophosphate-phosphate
  modified_base 19: mod_base = OTHER; note = 2'-O-methyl-adenosine-3'-phosphate
catgttatttgccttttga

SEQ ID NO: 1760 - RNA, 21 nt, synthetic construct
  source 1..21: mol_type = other RNA
  modified_base 1: mod_base = OTHER; note = 2'-O-methyl-uridine-3'-thiophosphate-phosphate
  modified_base 2: mod_base = OTHER; note = 2'-deoxy-cytidine-3'-thiophosphate-phosphate
  modified_base 3: mod_base = OTHER; note = 2'-fluoro-adenosine-3'-phosphate
  modified_base 4: mod_base = OTHER; note = 2'-O-methyl-adenosine-3'-phosphate
  modified_base 5: mod_base = OTHER; note = 2'-O-methyl-adenosine-3'-phosphate
  modified_base 6: mod_base = OTHER; note = 2'-O-methyl-adenosine-3'-phosphate
  modified_base 7: mod_base = OTHER; note = 2'-O-methyl-guanosine-3'-phosphate
  modified_base 8: mod_base = OTHER; note = 2'-O-methyl-guanosine-3'-phosphate
  modified_base 9: mod_base = OTHER; note = 2'-O-methyl-cytidine-3'-phosphate
  modified_base 10: mod_base = OTHER; note = 2'-O-methyl-adenosine-3'-phosphate
  modified_base 11: mod_base = OTHER; note = 2'-O-methyl-adenosine-3'-phosphate
  modified_base 12: mod_base = OTHER; note = 2'-O-methyl-adenosine-3'-phosphate
  modified_base 13: mod_base = OTHER; note = 2'-O-methyl-uridine-3'-phosphate
  modified_base 14: mod_base = OTHER; note = 2'-fluoro-adenosine-3'-phosphate
  modified_base 15: mod_base = OTHER; note = 2'-O-methyl-adenosine-3'-phosphate
  modified_base 16: mod_base = OTHER; note = 2'-O-methyl-cytidine-3'-phosphate
  modified_base 17: mod_base = OTHER; note = 2'-O-methyl-adenosine-3'-phosphate
  modified_base 18: mod_base = OTHER; note = 2'-O-methyl-uridine-3'-phosphate
  modified_base 19: mod_base = OTHER; note = 2'-O-methyl-guanosine-3'-thiophosphate-phosphate
  modified_base 20: mod_base = OTHER; note = 2'-O-methyl-uridine-3'-thiophosphate-phosphate
  modified_base 21: mod_base = OTHER; note = 2'-O-methyl-uridine-3'-phosphate
tcaaaaggcaaataacatgtt

SEQ ID NO: 1761 - RNA, 19 nt, synthetic construct
  source 1..19: mol_type = other RNA
  modified_base 1: mod_base = OTHER; note = 2'-O-methyl-cytidine-3'-thiophosphate-phosphate
  modified_base 2: mod_base = OTHER; note = 2'-O-methyl-adenosine-3'-thiophosphate-phosphate
  modified_base 3: mod_base = OTHER; note = 2'-O-methyl-uridine-3'-phosphate
  modified_base 4: mod_base = OTHER; note = 2'-O-methyl-guanosine-3'-phosphate
  modified_base 5: mod_base = OTHER; note = 2'-O-methyl-uridine-3'-phosphate
  modified_base 6: mod_base = OTHER; note = 2'-O-methyl-uridine-3'-phosphate
  modified_base 7: mod_base = OTHER; note = 2'-fluoro-adenosine-3'-phosphate
  modified_base 8: mod_base = OTHER; note = 2'-fluoro-uridine-3'-phosphate
  modified_base 9: mod_base = OTHER; note = 2'-fluoro-uridine-3'-phosphate
  modified_base 10: mod_base = OTHER; note = 2'-O-methyl-uridine-3'-phosphate
  modified_base 11: mod_base = OTHER; note = 2'-O-methyl-guanosine-3'-phosphate
  modified_base 12: mod_base = OTHER; note = 2'-O-methyl-cytidine-3'-phosphate
  modified_base 13: mod_base = OTHER; note = 2'-O-methyl-cytidine-3'-phosphate
  modified_base 14: mod_base = OTHER; note = 2'-O-methyl-uridine-3'-phosphate
  modified_base 15: mod_base = OTHER; note = 2'-O-methyl-uridine-3'-phosphate
  modified_base 16: mod_base = OTHER; note = 2'-O-methyl-uridine-3'-phosphate
  modified_base 17: mod_base = OTHER; note = 2'-O-methyl-uridine-3'-thiophosphate-phosphate
  modified_base 18: mod_base = OTHER; note = 2'-O-methyl-guanosine-3'-thiophosphate-phosphate
  modified_base 19: mod_base = OTHER; note = 2'-O-methyl-adenosine-3'-phosphate
catgttatttgccttttga

SEQ ID NO: 1762 - RNA, 21 nt, synthetic construct
  source 1..21: mol_type = other RNA
  modified_base 1: mod_base = OTHER; note = 2'-O-methyl-uridine-3'-thiophosphate-phosphate
  modified_base 2: mod_base = OTHER; note = 2'-deoxy-cytidine-3'-thiophosphate-phosphate
  modified_base 3: mod_base = OTHER; note = 2'-fluoro-adenosine-3'-phosphate
  modified_base 4: mod_base = OTHER; note = 2'-fluoro-adenosine-3'-phosphate
  modified_base 5: mod_base = OTHER; note = 2'-O-methyl-adenosine-3'-phosphate
  modified_base 6: mod_base = OTHER; note = 2'-O-methyl-adenosine-3'-phosphate
  modified_base 7: mod_base = OTHER; note = 2'-O-methyl-guanosine-3'-phosphate
  modified_base 8: mod_base = OTHER; note = 2'-O-methyl-guanosine-3'-phosphate
  modified_base 9: mod_base = OTHER; note = 2'-O-methyl-cytidine-3'-phosphate
  modified_base 10: mod_base = OTHER; note = 2'-O-methyl-adenosine-3'-phosphate
  modified_base 11: mod_base = OTHER; note = 2'-O-methyl-adenosine-3'-phosphate
  modified_base 12: mod_base = OTHER; note = 2'-O-methyl-adenosine-3'-phosphate
  modified_base 13: mod_base = OTHER; note = 2'-O-methyl-uridine-3'-phosphate
  modified_base 14: mod_base = OTHER; note = 2'-fluoro-adenosine-3'-phosphate
  modified_base 15: mod_base = OTHER; note = 2'-O-methyl-adenosine-3'-phosphate
  modified_base 16: mod_base = OTHER; note = 2'-O-methyl-cytidine-3'-phosphate
  modified_base 17: mod_base = OTHER; note = 2'-O-methyl-adenosine-3'-phosphate
  modified_base 18: mod_base = OTHER; note = 2'-O-methyl-uridine-3'-phosphate
  modified_base 19: mod_base = OTHER; note = 2'-O-methyl-guanosine-3'-thiophosphate-phosphate
  modified_base 20: mod_base = OTHER; note = 2'-O-methyl-uridine-3'-thiophosphate-phosphate
  modified_base 21: mod_base = OTHER; note = 2'-O-methyl-uridine-3'-phosphate
tcaaaaggcaaataacatgtt

SEQ ID NO: 1763 - RNA, 19 nt, synthetic construct
  source 1..19: mol_type = other RNA
  modified_base 1: mod_base = OTHER; note = 2'-O-methyl-cytidine-3'-thiophosphate-phosphate
  modified_base 2: mod_base = OTHER; note = 2'-O-methyl-adenosine-3'-thiophosphate-phosphate
  modified_base 3: mod_base = OTHER; note = 2'-O-methyl-uridine-3'-phosphate
  modified_base 4: mod_base = OTHER; note = 2'-O-methyl-guanosine-3'-phosphate
  modified_base 5: mod_base = OTHER; note = 2'-O-methyl-uridine-3'-phosphate
  modified_base 6: mod_base = OTHER; note = 2'-O-methyl-uridine-3'-phosphate
  modified_base 7: mod_base = OTHER; note = 2'-fluoro-adenosine-3'-phosphate
  modified_base 8: mod_base = OTHER; note = 2'-fluoro-uridine-3'-phosphate
  modified_base 9: mod_base = OTHER; note = 2'-fluoro-uridine-3'-phosphate
  modified_base 10: mod_base = OTHER; note = 2'-O-methyl-uridine-3'-phosphate
  modified_base 11: mod_base = OTHER; note = 2'-O-methyl-guanosine-3'-phosphate
  modified_base 12: mod_base = OTHER; note = 2'-O-methyl-cytidine-3'-phosphate
  modified_base 13: mod_base = OTHER; note = 2'-O-methyl-cytidine-3'-phosphate
  modified_base 14: mod_base = OTHER; note = 2'-O-methyl-uridine-3'-phosphate
  modified_base 15: mod_base = OTHER; note = 2'-O-methyl-uridine-3'-phosphate
  modified_base 16: mod_base = OTHER; note = 2'-O-methyl-uridine-3'-phosphate
  modified_base 17: mod_base = OTHER; note = 2'-O-methyl-uridine-3'-thiophosphate-phosphate
  modified_base 18: mod_base = OTHER; note = 2'-O-methyl-guanosine-3'-thiophosphate-phosphate
  modified_base 19: mod_base = OTHER; note = 2'-O-methyl-adenosine-3'-phosphate
catgttatttgccttttga

SEQ ID NO: 1764 - RNA, 21 nt, synthetic construct
  source 1..21: mol_type = other RNA
  modified_base 1: mod_base = OTHER; note = 2'-O-methyl-uridine-3'-thiophosphate-phosphate
  modified_base 2: mod_base = OTHER; note = 2'-deoxy-cytidine-3'-thiophosphate-phosphate
  modified_base 3: mod_base = OTHER; note = 2'-fluoro-adenosine-3'-phosphate
  modified_base 4: mod_base = OTHER; note = 2'-fluoro-adenosine-3'-phosphate
  modified_base 5: mod_base = OTHER; note = 2'-fluoro-adenosine-3'-phosphate
  modified_base 6: mod_base = OTHER; note = 2'-O-methyl-adenosine-3'-phosphate
  modified_base 7: mod_base = OTHER; note = 2'-O-methyl-guanosine-3'-phosphate
  modified_base 8: mod_base = OTHER; note = 2'-O-methyl-guanosine-3'-phosphate
  modified_base 9: mod_base = OTHER; note = 2'-O-methyl-cytidine-3'-phosphate
  modified_base 10: mod_base = OTHER; note = 2'-O-methyl-adenosine-3'-phosphate
  modified_base 11: mod_base = OTHER; note = 2'-O-methyl-adenosine-3'-phosphate
  modified_base 12: mod_base = OTHER; note = 2'-O-methyl-adenosine-3'-phosphate
  modified_base 13: mod_base = OTHER; note = 2'-O-methyl-uridine-3'-phosphate
  modified_base 14: mod_base = OTHER; note = 2'-fluoro-adenosine-3'-phosphate
  modified_base 15: mod_base = OTHER; note = 2'-O-methyl-adenosine-3'-phosphate
  modified_base 16: mod_base = OTHER; note = 2'-O-methyl-cytidine-3'-phosphate
  modified_base 17: mod_base = OTHER; note = 2'-O-methyl-adenosine-3'-phosphate
  modified_base 18: mod_base = OTHER; note = 2'-O-methyl-uridine-3'-phosphate
  modified_base 19: mod_base = OTHER; note = 2'-O-methyl-guanosine-3'-thiophosphate-phosphate
  modified_base 20: mod_base = OTHER; note = 2'-O-methyl-uridine-3'-thiophosphate-phosphate
  modified_base 21: mod_base = OTHER; note = 2'-O-methyl-uridine-3'-phosphate
tcaaaaggcaaataacatgtt

SEQ ID NO: 1765 - RNA, 19 nt, synthetic construct
  source 1..19: mol_type = other RNA
  modified_base 1: mod_base = OTHER; note = 2'-O-methyl-cytidine-3'-thiophosphate-phosphate
  modified_base 2: mod_base = OTHER; note = 2'-O-methyl-adenosine-3'-thiophosphate-phosphate
  modified_base 3: mod_base = OTHER; note = 2'-O-methyl-uridine-3'-phosphate
  modified_base 4: mod_base = OTHER; note = 2'-O-methyl-guanosine-3'-phosphate
  modified_base 5: mod_base = OTHER; note = 2'-O-methyl-uridine-3'-phosphate
  modified_base 6: mod_base = OTHER; note = 2'-O-methyl-uridine-3'-phosphate
  modified_base 7: mod_base = OTHER; note = 2'-fluoro-adenosine-3'-phosphate
  modified_base 8: mod_base = OTHER; note = 2'-fluoro-uridine-3'-phosphate
  modified_base 9: mod_base = OTHER; note = 2'-fluoro-uridine-3'-phosphate
  modified_base 10: mod_base = OTHER; note = 2'-O-methyl-uridine-3'-phosphate
  modified_base 11: mod_base = OTHER; note = 2'-O-methyl-guanosine-3'-phosphate
  modified_base 12: mod_base = OTHER; note = 2'-O-methyl-cytidine-3'-phosphate
  modified_base 13: mod_base = OTHER; note = 2'-O-methyl-cytidine-3'-phosphate
  modified_base 14: mod_base = OTHER; note = 2'-O-methyl-uridine-3'-phosphate
  modified_base 15: mod_base = OTHER; note = 2'-O-methyl-uridine-3'-phosphate
  modified_base 16: mod_base = OTHER; note = 2'-O-methyl-uridine-3'-phosphate
  modified_base 17: mod_base = OTHER; note = 2'-O-methyl-uridine-3'-thiophosphate-phosphate
  modified_base 18: mod_base = OTHER; note = 2'-O-methyl-guanosine-3'-thiophosphate-phosphate
  modified_base 19: mod_base = OTHER; note = 2'-O-methyl-adenosine-3'-phosphate
catgttatttgccttttga

SEQ ID NO: 1766 - RNA, 21 nt, synthetic construct
  source 1..21: mol_type = other RNA
  modified_base 1: mod_base = OTHER; note = 2'-O-methyl-uridine-3'-thiophosphate-phosphate
  modified_base 2: mod_base = OTHER; note = 2'-deoxy-cytidine-3'-thiophosphate-phosphate
  modified_base 3: mod_base = OTHER; note = 2'-O-methyl-adenosine-3'-phosphate
  modified_base 4: mod_base = OTHER; note = 2'-O-methyl-adenosine-3'-phosphate
  modified_base 5: mod_base = OTHER; note = 2'-deoxy-adenosine-3'-phosphate
  modified_base 6: mod_base = OTHER; note = 2'-O-methyl-adenosine-3'-phosphate
  modified_base 7: mod_base = OTHER; note = 2'-deoxy-guanosine-3'-phosphate
  modified_base 8: mod_base = OTHER; note = 2'-O-methyl-guanosine-3'-phosphate
  modified_base 9: mod_base = OTHER; note = 2'-O-methyl-cytidine-3'-phosphate
  modified_base 10: mod_base = OTHER; note = 2'-O-methyl-adenosine-3'-phosphate
  modified_base 11: mod_base = OTHER; note = 2'-O-methyl-adenosine-3'-phosphate
  modified_base 12: mod_base = OTHER; note = 2'-deoxy-adenosine-3'-phosphate
  modified_base 13: mod_base = OTHER; note = 2'-O-methyl-uridine-3'-phosphate
  modified_base 14: mod_base = OTHER; note = 2'-fluoro-adenosine-3'-phosphate
  modified_base 15: mod_base = OTHER; note = 2'-O-methyl-adenosine-3'-phosphate
  modified_base 16: mod_base = OTHER; note = 2'-O-methyl-cytidine-3'-phosphate
  modified_base 17: mod_base = OTHER; note = 2'-O-methyl-adenosine-3'-phosphate
  modified_base 18: mod_base = OTHER; note = 2'-O-methyl-uridine-3'-phosphate
  modified_base 19: mod_base = OTHER; note = 2'-O-methyl-guanosine-3'-thiophosphate-phosphate
  modified_base 20: mod_base = OTHER; note = 2'-O-methyl-uridine-3'-thiophosphate-phosphate
  modified_base 21: mod_base = OTHER; note = 2'-O-methyl-uridine-3'-phosphate
tcaaaaggcaaataacatgtt

SEQ ID NO: 1767 - RNA, 19 nt, synthetic construct
  source 1..19: mol_type = other RNA
  modified_base 1: mod_base = OTHER; note = 2'-O-methyl-cytidine-3'-thiophosphate-phosphate
  modified_base 2: mod_base = OTHER; note = 2'-O-methyl-adenosine-3'-thiophosphate-phosphate
  modified_base 3: mod_base = OTHER; note = 2'-fluoro-uridine-3'-phosphate
  modified_base 4: mod_base = OTHER; note = 2'-O-methyl-guanosine-3'-phosphate
  modified_base 5: mod_base = OTHER; note = 2'-O-methyl-uridine-3'-phosphate
  modified_base 6: mod_base = OTHER; note = 2'-O-methyl-uridine-3'-phosphate
  modified_base 7: mod_base = OTHER; note = 2'-fluoro-adenosine-3'-phosphate
  modified_base 8: mod_base = OTHER; note = 2'-fluoro-uridine-3'-phosphate
  modified_base 9: mod_base = OTHER; note = 2'-fluoro-uridine-3'-phosphate
  modified_base 10: mod_base = OTHER; note = 2'-O-methyl-uridine-3'-phosphate
  modified_base 11: mod_base = OTHER; note = 2'-O-methyl-guanosine-3'-phosphate
  modified_base 12: mod_base = OTHER; note = 2'-O-methyl-cytidine-3'-phosphate
  modified_base 13: mod_base = OTHER; note = 2'-O-methyl-cytidine-3'-phosphate
  modified_base 14: mod_base = OTHER; note = 2'-O-methyl-uridine-3'-phosphate
  modified_base 15: mod_base = OTHER; note = 2'-O-methyl-uridine-3'-phosphate
  modified_base 16: mod_base = OTHER; note = 2'-O-methyl-uridine-3'-phosphate
  modified_base 17: mod_base = OTHER; note = 2'-O-methyl-uridine-3'-thiophosphate-phosphate
  modified_base 18: mod_base = OTHER; note = 2'-O-methyl-guanosine-3'-thiophosphate-phosphate
  modified_base 19: mod_base = OTHER; note = 2'-O-methyl-adenosine-3'-phosphate
catgttatttgccttttga

SEQ ID NO: 1768 - RNA, 21 nt, synthetic construct
  source 1..21: mol_type = other RNA
  modified_base 1: mod_base = OTHER; note = 2'-O-methyl-uridine-3'-thiophosphate-phosphate
  modified_base 2: mod_base = OTHER; note = 2'-deoxy-cytidine-3'-thiophosphate-phosphate
  modified_base 3: mod_base = OTHER; note = 2'-O-methyl-adenosine-3'-phosphate
  modified_base 4: mod_base = OTHER; note = 2'-O-methyl-adenosine-3'-phosphate
  modified_base 5: mod_base = OTHER; note = 2'-deoxy-adenosine-3'-phosphate
  modified_base 6: mod_base = OTHER; note = 2'-O-methyl-adenosine-3'-phosphate
  modified_base 7: mod_base = OTHER; note = 2'-deoxy-guanosine-3'-phosphate
  modified_base 8: mod_base = OTHER; note = 2'-O-methyl-guanosine-3'-phosphate
  modified_base 9: mod_base = OTHER; note = 2'-O-methyl-cytidine-3'-phosphate
  modified_base 10: mod_base = OTHER; note = 2'-O-methyl-adenosine-3'-phosphate
  modified_base 11: mod_base = OTHER; note = 2'-O-methyl-adenosine-3'-phosphate
  modified_base 12: mod_base = OTHER; note = 2'-deoxy-adenosine-3'-phosphate
  modified_base 13: mod_base = OTHER; note = 2'-O-methyl-uridine-3'-phosphate
  modified_base 14: mod_base = OTHER; note = 2'-fluoro-adenosine-3'-phosphate
  modified_base 15: mod_base = OTHER; note = 2'-O-methyl-adenosine-3'-phosphate
  modified_base 16: mod_base = OTHER; note = 2'-O-methyl-cytidine-3'-phosphate
  modified_base 17: mod_base = OTHER; note = 2'-O-methyl-adenosine-3'-phosphate
  modified_base 18: mod_base = OTHER; note = 2'-O-methyl-uridine-3'-phosphate
  modified_base 19: mod_base = OTHER; note = 2'-O-methyl-guanosine-3'-thiophosphate-phosphate
  modified_base 20: mod_base = OTHER; note = 2'-O-methyl-uridine-3'-thiophosphate-phosphate
  modified_base 21: mod_base = OTHER; note = 2'-O-methyl-uridine-3'-phosphate
tcaaaaggcaaataacatgtt

SEQ ID NO: 1769 - RNA, 21 nt, synthetic construct
  source 1..21: mol_type = other RNA
  modified_base 1: mod_base = OTHER; note = 2'-O-methyl-adenosine-3'-thiophosphate-phosphate
  modified_base 2: mod_base = OTHER; note = 2'-O-methyl-adenosine-3'-thiophosphate-phosphate
  modified_base 3: mod_base = OTHER; note = 2'-O-methyl-cytidine-3'-phosphate
  modified_base 4: mod_base = OTHER; note = 2'-O-methyl-adenosine-3'-phosphate
  modified_base 5: mod_base = OTHER; note = 2'-O-methyl-uridine-3'-phosphate
  modified_base 6: mod_base = OTHER; note = 2'-O-methyl-guanosine-3'-phosphate
  modified_base 7: mod_base = OTHER; note = 2'-O-methyl-uridine-3'-phosphate
  modified_base 8: mod_base = OTHER; note = 2'-O-methyl-uridine-3'-phosphate
  modified_base 9: mod_base = OTHER; note = 2'-fluoro-adenosine-3'-phosphate
  modified_base 10: mod_base = OTHER; note = 2'-fluoro-uridine-3'-phosphate
  modified_base 11: mod_base = OTHER; note = 2'-fluoro-uridine-3'-phosphate
  modified_base 12: mod_base = OTHER; note = 2'-O-methyl-uridine-3'-phosphate
  modified_base 13: mod_base = OTHER; note = 2'-O-methyl-guanosine-3'-phosphate
  modified_base 14: mod_base = OTHER; note = 2'-O-methyl-cytidine-3'-phosphate
  modified_base 15: mod_base = OTHER; note = 2'-O-methyl-cytidine-3'-phosphate
  modified_base 16: mod_base = OTHER; note = 2'-O-methyl-uridine-3'-phosphate
  modified_base 17: mod_base = OTHER; note = 2'-O-methyl-uridine-3'-phosphate
  modified_base 18: mod_base = OTHER; note = 2'-O-methyl-uridine-3'-phosphate
  modified_base 19: mod_base = OTHER; note = 2'-O-methyl-uridine-3'-thiophosphate-phosphate
  modified_base 20: mod_base = OTHER; note = 2'-O-methyl-guanosine-3'-thiophosphate-phosphate
  modified_base 21: mod_base = OTHER; note = 2'-O-methyl-adenosine-3'-phosphate
aacatgttatttgccttttga

SEQ ID NO: 1770 - RNA, 21 nt, synthetic construct
  source 1..21: mol_type = other RNA
  modified_base 1: mod_base = OTHER; note = 2'-O-methyl-uridine-3'-thiophosphate-phosphate
  modified_base 2: mod_base = OTHER; note = 2'-deoxy-cytidine-3'-thiophosphate-phosphate
  modified_base 3: mod_base = OTHER; note = 2'-O-methyl-adenosine-3'-phosphate
  modified_base 4: mod_base = OTHER; note = 2'-O-methyl-adenosine-3'-phosphate
  modified_base 5: mod_base = OTHER; note = 2'-deoxy-adenosine-3'-phosphate
  modified_base 6: mod_base = OTHER; note = 2'-O-methyl-adenosine-3'-phosphate
  modified_base 7: mod_base = OTHER; note = 2'-deoxy-guanosine-3'-phosphate
  modified_base 8: mod_base = OTHER; note = 2'-O-methyl-guanosine-3'-phosphate
  modified_base 9: mod_base = OTHER; note = 2'-O-methyl-cytidine-3'-phosphate
  modified_base 10: mod_base = OTHER; note = 2'-O-methyl-adenosine-3'-phosphate
  modified_base 11: mod_base = OTHER; note = 2'-O-methyl-adenosine-3'-phosphate
  modified_base 12: mod_base = OTHER; note = 2'-deoxy-adenosine-3'-phosphate
  modified_base 13: mod_base = OTHER; note = 2'-O-methyl-uridine-3'-phosphate
  modified_base 14: mod_base = OTHER; note = 2'-fluoro-adenosine-3'-phosphate
  modified_base 15: mod_base = OTHER; note = 2'-O-methyl-adenosine-3'-phosphate
  modified_base 16: mod_base = OTHER; note = 2'-O-methyl-cytidine-3'-phosphate
  modified_base 17: mod_base = OTHER; note = 2'-O-methyl-adenosine-3'-phosphate
  modified_base 18: mod_base = OTHER; note = 2'-O-methyl-uridine-3'-phosphate
  modified_base 19: mod_base = OTHER; note = 2'-O-methyl-guanosine-3'-thiophosphate-phosphate
  modified_base 20: mod_base = OTHER; note = 2'-O-methyl-uridine-3'-thiophosphate-phosphate
  modified_base 21: mod_base = OTHER; note = 2'-O-methyl-uridine-3'-phosphate
tcaaaaggcaaataacatgtt

SEQ ID NO: 1771 - RNA, 21 nt, synthetic construct
  source 1..21: mol_type = other RNA
  modified_base 1: mod_base = OTHER; note = inverted 2'-O-methyl-adenosine-3'-thiophosphate-phosphate
  modified_base 2: mod_base = OTHER; note = 2'-O-methyl-adenosine-3'-thiophosphate-phosphate
  modified_base 3: mod_base = OTHER; note = 2'-O-methyl-cytidine-3'-phosphate
  modified_base 4: mod_base = OTHER; note = 2'-O-methyl-adenosine-3'-phosphate
  modified_base 5: mod_base = OTHER; note = 2'-O-methyl-uridine-3'-phosphate
  modified_base 6: mod_base = OTHER; note = 2'-O-methyl-guanosine-3'-phosphate
  modified_base 7: mod_base = OTHER; note = 2'-O-methyl-uridine-3'-phosphate
  modified_base 8: mod_base = OTHER; note = 2'-O-methyl-uridine-3'-phosphate
  modified_base 9: mod_base = OTHER; note = 2'-fluoro-adenosine-3'-phosphate
  modified_base 10: mod_base = OTHER; note = 2'-fluoro-uridine-3'-phosphate
  modified_base 11: mod_base = OTHER; note = 2'-fluoro-uridine-3'-phosphate
  modified_base 12: mod_base = OTHER; note = 2'-O-methyl-uridine-3'-phosphate
  modified_base 13: mod_base = OTHER; note = 2'-O-methyl-guanosine-3'-phosphate
  modified_base 14: mod_base = OTHER; note = 2'-O-methyl-cytidine-3'-phosphate
  modified_base 15: mod_base = OTHER; note = 2'-O-methyl-cytidine-3'-phosphate
  modified_base 16: mod_base = OTHER; note = 2'-O-methyl-uridine-3'-phosphate
  modified_base 17: mod_base = OTHER; note = 2'-O-methyl-uridine-3'-phosphate
  modified_base 18: mod_base = OTHER; note = 2'-O-methyl-uridine-3'-phosphate
  modified_base 19: mod_base = OTHER; note = 2'-O-methyl-uridine-3'-thiophosphate-phosphate
  modified_base 20: mod_base = OTHER; note = 2'-O-methyl-guanosine-3'-thiophosphate-phosphate
  modified_base 21: mod_base = OTHER; note = 2'-O-methyl-adenosine-3'-phosphate
aacatgttatttgccttttga

SEQ ID NO: 1772 - RNA, 21 nt, synthetic construct
  source 1..21: mol_type = other RNA
  modified_base 1: mod_base = OTHER; note = 2'-O-methyl-uridine-3'-thiophosphate-phosphate
  modified_base 2: mod_base = OTHER; note = 2'-deoxy-cytidine-3'-thiophosphate-phosphate
  modified_base 3: mod_base = OTHER; note = 2'-O-methyl-adenosine-3'-phosphate
  modified_base 4: mod_base = OTHER; note = 2'-O-methyl-adenosine-3'-phosphate
  modified_base 5: mod_base = OTHER; note = 2'-deoxy-adenosine-3'-phosphate
  modified_base 6: mod_base = OTHER; note = 2'-O-methyl-adenosine-3'-phosphate
  modified_base 7: mod_base = OTHER; note = 2'-deoxy-guanosine-3'-phosphate
  modified_base 8: mod_base = OTHER; note = 2'-O-methyl-guanosine-3'-phosphate
  modified_base 9: mod_base = OTHER; note = 2'-O-methyl-cytidine-3'-phosphate
  modified_base 10: mod_base = OTHER; note = 2'-O-methyl-adenosine-3'-phosphate
  modified_base 11: mod_base = OTHER; note = 2'-O-methyl-adenosine-3'-phosphate
  modified_base 12: mod_base = OTHER; note = 2'-deoxy-adenosine-3'-phosphate
  modified_base 13: mod_base = OTHER; note = 2'-O-methyl-uridine-3'-phosphate
  modified_base 14: mod_base = OTHER; note = 2'-fluoro-adenosine-3'-phosphate
  modified_base 15: mod_base = OTHER; note = 2'-O-methyl-adenosine-3'-phosphate
  modified_base 16: mod_base = OTHER; note = 2'-O-methyl-cytidine-3'-phosphate
  modified_base 17: mod_base = OTHER; note = 2'-O-methyl-adenosine-3'-phosphate
  modified_base 18: mod_base = OTHER; note = 2'-O-methyl-uridine-3'-phosphate
  modified_base 19: mod_base = OTHER; note = 2'-O-methyl-guanosine-3'-thiophosphate-phosphate
  modified_base 20: mod_base = OTHER; note = 2'-O-methyl-uridine-3'-thiophosphate-phosphate
  modified_base 21: mod_base = OTHER; note = 2'-O-methyl-uridine-3'-phosphate
tcaaaaggcaaataacatgtt

SEQ ID NO: 1773 - RNA, 19 nt, synthetic construct
  source 1..19: mol_type = other RNA
  modified_base 1: mod_base = OTHER; note = inverted 2'-O-methyl-cytidine-3'-thiophosphate-phosphate
  modified_base 2: mod_base = OTHER; note = 2'-O-methyl-adenosine-3'-thiophosphate-phosphate
  modified_base 3: mod_base = OTHER; note = 2'-O-methyl-uridine-3'-phosphate
  modified_base 4: mod_base = OTHER; note = 2'-O-methyl-guanosine-3'-phosphate
  modified_base 5: mod_base = OTHER; note = 2'-O-methyl-uridine-3'-phosphate
  modified_base 6: mod_base = OTHER; note = 2'-O-methyl-uridine-3'-phosphate
  modified_base 7: mod_base = OTHER; note = 2'-fluoro-adenosine-3'-phosphate
  modified_base 8: mod_base = OTHER; note = 2'-fluoro-uridine-3'-phosphate
  modified_base 9: mod_base = OTHER; note = 2'-fluoro-uridine-3'-phosphate
  modified_base 10: mod_base = OTHER; note = 2'-O-methyl-uridine-3'-phosphate
  modified_base 11: mod_base = OTHER; note = 2'-O-methyl-guanosine-3'-phosphate
  modified_base 12: mod_base = OTHER; note = 2'-O-methyl-cytidine-3'-phosphate
  modified_base 13: mod_base = OTHER; note = 2'-O-methyl-cytidine-3'-phosphate
  modified_base 14: mod_base = OTHER; note = 2'-O-methyl-uridine-3'-phosphate
  modified_base 15: mod_base = OTHER; note = 2'-O-methyl-uridine-3'-phosphate
  modified_base 16: mod_base = OTHER; note = 2'-O-methyl-uridine-3'-phosphate
  modified_base 17: mod_base = OTHER; note = 2'-O-methyl-uridine-3'-thiophosphate-phosphate
  modified_base 18: mod_base = OTHER; note = 2'-O-methyl-guanosine-3'-thiophosphate-phosphate
  modified_base 19: mod_base = OTHER; note = 2'-O-methyl-adenosine-3'-phosphate
catgttatttgccttttga

SEQ ID NO: 1774 - RNA, 21 nt, synthetic construct
  source 1..21: mol_type = other RNA
  modified_base 1: mod_base = OTHER; note = 2'-O-methyl-uridine-3'-thiophosphate-phosphate
  modified_base 2: mod_base = OTHER; note = 2'-deoxy-cytidine-3'-thiophosphate-phosphate
  modified_base 3: mod_base = OTHER; note = 2'-O-methyl-adenosine-3'-phosphate
  modified_base 4: mod_base = OTHER; note = 2'-O-methyl-adenosine-3'-phosphate
  modified_base 5: mod_base = OTHER; note = 2'-deoxy-adenosine-3'-phosphate
  modified_base 6: mod_base = OTHER; note = 2'-O-methyl-adenosine-3'-phosphate
  modified_base 7: mod_base = OTHER; note = 2'-deoxy-guanosine-3'-phosphate
  modified_base 8: mod_base = OTHER; note = 2'-O-methyl-guanosine-3'-phosphate
  modified_base 9: mod_base = OTHER; note = 2'-O-methyl-cytidine-3'-phosphate
  modified_base 10: mod_base = OTHER; note = 2'-O-methyl-adenosine-3'-phosphate
  modified_base 11: mod_base = OTHER; note = 2'-O-methyl-adenosine-3'-phosphate
  modified_base 12: mod_base = OTHER; note = 2'-deoxy-adenosine-3'-phosphate
  modified_base 13: mod_base = OTHER; note = 2'-O-methyl-uridine-3'-phosphate
  modified_base 14: mod_base = OTHER; note = 2'-fluoro-adenosine-3'-phosphate
  modified_base 15: mod_base = OTHER; note = 2'-O-methyl-adenosine-3'-phosphate
  modified_base 16: mod_base = OTHER; note = 2'-O-methyl-cytidine-3'-phosphate
  modified_base 17: mod_base = OTHER; note = 2'-O-methyl-adenosine-3'-phosphate
  modified_base 18: mod_base = OTHER; note = 2'-O-methyl-uridine-3'-phosphate
  modified_base 19: mod_base = OTHER; note = 2'-O-methyl-guanosine-3'-thiophosphate-phosphate
  modified_base 20: mod_base = OTHER; note = 2'-O-methyl-uridine-3'-thiophosphate-phosphate
  modified_base 21: mod_base = OTHER; note = 2'-O-methyl-uridine-3'-phosphate
tcaaaaggcaaataacatgtt

SEQ ID NO: 1775 - RNA, 21 nt, synthetic construct
  source 1..21: mol_type = other RNA
  modified_base 1: mod_base = OTHER; note = inverted 2'-O-methyl-adenosine-3'-thiophosphate-phosphate
  modified_base 2: mod_base = OTHER; note = 2'-O-methyl-adenosine-3'-thiophosphate-phosphate
  modified_base 3: mod_base = OTHER; note = 2'-O-methyl-cytidine-3'-phosphate
  modified_base 4: mod_base = OTHER; note = 2'-O-methyl-adenosine-3'-phosphate
  modified_base 5: mod_base = OTHER; note = 2'-O-methyl-uridine-3'-phosphate
  modified_base 6: mod_base = OTHER; note = 2'-O-methyl-guanosine-3'-phosphate
  modified_base 7: mod_base = OTHER; note = 2'-O-methyl-uridine-3'-phosphate
  modified_base 8: mod_base = OTHER; note = 2'-O-methyl-uridine-3'-phosphate
  modified_base 9: mod_base = OTHER; note = 2'-fluoro-adenosine-3'-phosphate
  modified_base 10: mod_base = OTHER; note = 2'-fluoro-uridine-3'-phosphate
  modified_base 11: mod_base = OTHER; note = 2'-fluoro-uridine-3'-phosphate
  modified_base 12: mod_base = OTHER; note = 2'-O-methyl-uridine-3'-phosphate
  modified_base 13: mod_base = OTHER; note = 2'-O-methyl-guanosine-3'-phosphate
  modified_base 14: mod_base = OTHER; note = 2'-O-methyl-cytidine-3'-phosphate
  modified_base 15: mod_base = OTHER; note = 2'-O-methyl-cytidine-3'-phosphate
  modified_base 16: mod_base = OTHER; note = 2'-O-methyl-uridine-3'-phosphate
  modified_base 17: mod_base = OTHER; note = 2'-O-methyl-uridine-3'-phosphate
  modified_base 18: mod_base = OTHER; note = 2'-O-methyl-uridine-3'-phosphate
  modified_base 19: mod_base = OTHER; note = 2'-O-methyl-uridine-3'-thiophosphate-phosphate
  modified_base 20: mod_base = OTHER; note = 2'-O-methyl-guanosine-3'-thiophosphate-phosphate
  modified_base 21: mod_base = OTHER; note = 2'-O-methyl-adenosine-3'-phosphate
aacatgttatttgccttttga

SEQ ID NO: 1776 - RNA, 21 nt, synthetic construct
  source 1..21: mol_type = other RNA
  modified_base 1: mod_base = OTHER; note = 2'-O-methyl-uridine-3'-thiophosphate-phosphate
  modified_base 2: mod_base = OTHER; note = 2'-deoxy-cytidine-3'-thiophosphate-phosphate
  modified_base 3: mod_base = OTHER; note = 2'-O-methyl-adenosine-3'-phosphate
  modified_base 4: mod_base = OTHER; note = 2'-O-methyl-adenosine-3'-phosphate
  modified_base 5: mod_base = OTHER; note = 2'-deoxy-adenosine-3'-phosphate
  modified_base 6: mod_base = OTHER; note = 2'-O-methyl-adenosine-3'-phosphate
  modified_base 7: mod_base = OTHER; note = 2'-deoxy-guanosine-3'-phosphate
  modified_base 8: mod_base = OTHER; note = 2'-O-methyl-guanosine-3'-phosphate
  modified_base 9: mod_base = OTHER; note = 2'-O-methyl-cytidine-3'-phosphate
  modified_base 10: mod_base = OTHER; note = 2'-O-methyl-adenosine-3'-phosphate
  modified_base 11: mod_base = OTHER; note = 2'-O-methyl-adenosine-3'-phosphate
  modified_base 12: mod_base = OTHER; note = 2'-deoxy-adenosine-3'-phosphate
  modified_base 13: mod_base = OTHER; note = 2'-O-methyl-uridine-3'-phosphate
  modified_base 14: mod_base = OTHER; note = 2'-fluoro-adenosine-3'-phosphate
  modified_base 15: mod_base = OTHER; note = 2'-O-methyl-adenosine-3'-phosphate
  modified_base 16: mod_base = OTHER; note = 2'-O-methyl-cytidine-3'-phosphate
  modified_base 17: mod_base = OTHER; note = 2'-O-methyl-adenosine-3'-phosphate
  modified_base 18: mod_base = OTHER; note = 2'-O-methyl-uridine-3'-phosphate
  modified_base 19: mod_base = OTHER; note = 2'-O-methyl-guanosine-3'-thiophosphate-phosphate
  modified_base 20: mod_base = OTHER; note = 2'-O-methyl-uridine-3'-thiophosphate-phosphate
  modified_base 21: mod_base = OTHER; note = 2'-O-methyl-uridine-3'-phosphate
tcaaaaggcaaataacatgtt

SEQ ID NO: 1777 - RNA, 19 nt, synthetic construct
  source 1..19: mol_type = other RNA
  modified_base 1: mod_base = OTHER; note = 2'-O-methyl-cytidine-3'-thiophosphate-phosphate
  modified_base 2: mod_base = OTHER; note = 2'-O-methyl-adenosine-3'-thiophosphate-phosphate
  modified_base 3: mod_base = OTHER; note = 2'-O-methyl-uridine-3'-phosphate
  modified_base 4: mod_base = OTHER; note = 2'-O-methyl-guanosine-3'-phosphate
  modified_base 5: mod_base = OTHER; note = 2'-O-methyl-uridine-3'-phosphate
  modified_base 6: mod_base = OTHER; note = 2'-O-methyl-uridine-3'-phosphate
  modified_base 7: mod_base = OTHER; note = 2'-fluoro-adenosine-3'-phosphate
  modified_base 8: mod_base = OTHER; note = 2'-fluoro-uridine-3'-phosphate
  modified_base 9: mod_base = OTHER; note = 2'-fluoro-uridine-3'-phosphate
  modified_base 10: mod_base = OTHER; note = 2'-O-methyl-uridine-3'-phosphate
  modified_base 11: mod_base = OTHER; note = 2'-O-methyl-guanosine-3'-phosphate
  modified_base 12: mod_base = OTHER; note = 2'-O-methyl-cytidine-3'-phosphate
  modified_base 13: mod_base = OTHER; note = 2'-O-methyl-cytidine-3'-phosphate
  modified_base 14: mod_base = OTHER; note = 2'-O-methyl-uridine-3'-phosphate
  modified_base 15: mod_base = OTHER; note = 2'-O-methyl-uridine-3'-phosphate
  modified_base 16: mod_base = OTHER; note = 2'-O-methyl-uridine-3'-phosphate
  modified_base 17: mod_base = OTHER; note = 2'-O-methyl-uridine-3'-thiophosphate-phosphate
  modified_base 18: mod_base = OTHER; note = 2'-O-methyl-guanosine-3'-thiophosphate-phosphate
  modified_base 19: mod_base = OTHER; note = inverted 2'-O-methyl-adenosine-3'-phosphate
catgttatttgccttttga

SEQ ID NO: 1778 - RNA, 21 nt, synthetic construct
  source 1..21: mol_type = other RNA
  modified_base 1: mod_base = OTHER; note = 2'-O-methyl-uridine-3'-thiophosphate-phosphate
  modified_base 2: mod_base = OTHER; note = 2'-fluoro-cytidine-3'-thiophosphate-phosphate
  modified_base 3: mod_base = OTHER; note = 2'-O-methyl-adenosine-3'-phosphate
  modified_base 4: mod_base = OTHER; note = 2'-O-methyl-adenosine-3'-phosphate
  modified_base 5: mod_base = OTHER; note = 2'-O-methyl-adenosine-3'-phosphate
  modified_base 6: mod_base = OTHER; note = 2'-O-methyl-adenosine-3'-phosphate
  modified_base 7: mod_base = OTHER; note = 2'-O-methyl-guanosine-3'-phosphate
  modified_base 8: mod_base = OTHER; note = 2'-O-methyl-guanosine-3'-phosphate
  modified_base 9: mod_base = OTHER; note = 2'-O-methyl-cytidine-3'-phosphate
  modified_base 10: mod_base = OTHER; note = 2'-O-methyl-adenosine-3'-phosphate
  modified_base 11: mod_base = OTHER; note = 2'-O-methyl-adenosine-3'-phosphate
  modified_base 12: mod_base = OTHER; note = 2'-O-methyl-adenosine-3'-phosphate
  modified_base 13: mod_base = OTHER; note = 2'-O-methyl-uridine-3'-phosphate
  modified_base 14: mod_base = OTHER; note = 2'-fluoro-adenosine-3'-phosphate
  modified_base 15: mod_base = OTHER; note = 2'-O-methyl-adenosine-3'-phosphate
  modified_base 16: mod_base = OTHER; note = 2'-O-methyl-cytidine-3'-phosphate
  modified_base 17: mod_base = OTHER; note = 2'-O-methyl-adenosine-3'-phosphate
  modified_base 18: mod_base = OTHER; note = 2'-O-methyl-uridine-3'-phosphate
  modified_base 19: mod_base = OTHER; note = 2'-O-methyl-guanosine-3'-thiophosphate-phosphate
  modified_base 20: mod_base = OTHER; note = 2'-O-methyl-uridine-3'-thiophosphate-phosphate
  modified_base 21: mod_base = OTHER; note = 2'-O-methyl-uridine-3'-phosphate
tcaaaaggcaaataacatgtt

SEQ ID NO: 1779 - RNA, 19 nt, synthetic construct
  source 1..19: mol_type = other RNA
  modified_base 1: mod_base = OTHER; note = 2'-O-methyl-guanosine-3'-thiophosphate-phosphate
  modified_base 2: mod_base = OTHER; note = 2'-O-methyl-cytidine-3'-thiophosphate-phosphate
  modified_base 3: mod_base = OTHER; note = 2'-O-methyl-uridine-3'-phosphate
  modified_base 4: mod_base = OTHER; note = 2'-O-methyl-guanosine-3'-phosphate
  modified_base 5: mod_base = OTHER; note = 2'-O-methyl-adenosine-3'-phosphate
  modified_base 6: mod_base = OTHER; note = 2'-O-methyl-guanosine-3'-phosphate
  modified_base 7: mod_base = OTHER; note = 2'-fluoro-adenosine-3'-phosphate
  modified_base 8: mod_base = OTHER; note = 2'-fluoro-cytidine-3'-phosphate
  modified_base 9: mod_base = OTHER; note = 2'-fluoro-uridine-3'-phosphate
  modified_base 10: mod_base = OTHER; note = 2'-O-methyl-cytidine-3'-phosphate
  modified_base 11: mod_base = OTHER; note = 2'-O-methyl-uridine-3'-phosphate
  modified_base 12: mod_base = OTHER; note = 2'-O-methyl-guanosine-3'-phosphate
  modified_base 13: mod_base = OTHER; note = 2'-O-methyl-guanosine-3'-phosphate
  modified_base 14: mod_base = OTHER; note = 2'-O-methyl-cytidine-3'-phosphate
  modified_base 15: mod_base = OTHER; note = 2'-O-methyl-uridine-3'-phosphate
  modified_base 16: mod_base = OTHER; note = 2'-O-methyl-uridine-3'-phosphate
  modified_base 17: mod_base = OTHER; note = 2'-O-methyl-adenosine-3'-phosphate
  modified_base 18: mod_base = OTHER; note = 2'-O-methyl-uridine-3'-phosphate
  modified_base 19: mod_base = OTHER; note = 2'-O-methyl-uridine-3'-phosphate
gctgagactctggcttatt

SEQ ID NO: 1780 - RNA, 21 nt, synthetic construct
  source 1..21: mol_type = other RNA
  modified_base 1: mod_base = OTHER; note = 2'-O-methyl-adenosine-3'-thiophosphate-phosphate
  modified_base 2: mod_base = OTHER; note = 2'-fluoro-adenosine-3'-thiophosphate-phosphate
  modified_base 3: mod_base = OTHER; note = 2'-O-methyl-uridine-3'-phosphate
  modified_base 4: mod_base = OTHER; note = 2'-O-methyl-adenosine-3'-phosphate
  modified_base 5: mod_base = OTHER; note = 2'-O-methyl-adenosine-3'-phosphate
  modified_base 6: mod_base = OTHER; note = 2'-O-methyl-guanosine-3'-phosphate
  modified_base 7: mod_base = OTHER; note = 2'-O-methyl-cytidine-3'-phosphate
  modified_base 8: mod_base = OTHER; note = 2'-O-methyl-cytidine-3'-phosphate
  modified_base 9: mod_base = OTHER; note = 2'-O-methyl-adenosine-3'-phosphate
  modified_base 10: mod_base = OTHER; note = 2'-O-methyl-guanosine-3'-phosphate
  modified_base 11: mod_base = OTHER; note = 2'-O-methyl-adenosine-3'-phosphate
  modified_base 12: mod_base = OTHER; note = 2'-O-methyl-guanosine-3'-phosphate
  modified_base 13: mod_base = OTHER; note = 2'-O-methyl-uridine-3'-phosphate
  modified_base 14: mod_base = OTHER; note = 2'-fluoro-cytidine-3'-phosphate
  modified_base 15: mod_base = OTHER; note = 2'-O-methyl-uridine-3'-phosphate
  modified_base 16: mod_base = OTHER; note = 2'-O-methyl-cytidine-3'-phosphate
  modified_base 17: mod_base = OTHER; note = 2'-O-methyl-adenosine-3'-phosphate
  modified_base 18: mod_base = OTHER; note = 2'-O-methyl-guanosine-3'-phosphate
  modified_base 19: mod_base = OTHER; note = 2'-O-methyl-cytidine-3'-thiophosphate-phosphate
  modified_base 20: mod_base = OTHER; note = 2'-O-methyl-cytidine-3'-thiophosphate-phosphate
  modified_base 21: mod_base = OTHER; note = 2'-O-methyl-adenosine-3'-phosphate
aataagccagagtctcagcca

SEQ ID NO: 1781 - RNA, 19 nt, synthetic construct
  source 1..19: mol_type = other RNA
  modified_base 1: mod_base = OTHER; note = 2'-O-methyl-guanosine-3'-thiophosphate-phosphate
  modified_base 2: mod_base = OTHER; note = 2'-O-methyl-cytidine-3'-thiophosphate-phosphate
  modified_base 3: mod_base = OTHER; note = 2'-O-methyl-uridine-3'-phosphate
  modified_base 4: mod_base = OTHER; note = 2'-O-methyl-guanosine-3'-phosphate
  modified_base 5: mod_base = OTHER; note = 2'-O-methyl-adenosine-3'-phosphate
  modified_base 6: mod_base = OTHER; note = 2'-O-methyl-guanosine-3'-phosphate
  modified_base 7: mod_base = OTHER; note = 2'-fluoro-adenosine-3'-phosphate
  modified_base 8: mod_base = OTHER; note = 2'-fluoro-cytidine-3'-phosphate
  modified_base 9: mod_base = OTHER; note = 2'-fluoro-uridine-3'-phosphate
  modified_base 10: mod_base = OTHER; note = 2'-O-methyl-cytidine-3'-phosphate
  modified_base 11: mod_base = OTHER; note = 2'-O-methyl-uridine-3'-phosphate
  modified_base 12: mod_base = OTHER; note = 2'-O-methyl-guanosine-3'-phosphate
  modified_base 13: mod_base = OTHER; note = 2'-O-methyl-guanosine-3'-phosphate
  modified_base 14: mod_base = OTHER; note = 2'-O-methyl-cytidine-3'-phosphate
  modified_base 15: mod_base = OTHER; note = 2'-O-methyl-uridine-3'-phosphate
  modified_base 16: mod_base = OTHER; note = 2'-O-methyl-uridine-3'-phosphate
  modified_base 17: mod_base = OTHER; note = 2'-O-methyl-adenosine-3'-phosphate
  modified_base 18: mod_base = OTHER; note = 2'-O-methyl-uridine-3'-phosphate
  modified_base 19: mod_base = OTHER; note = 2'-O-methyl-uridine-3'-phosphate
gctgagactctggcttatt

SEQ ID NO: 1782 - RNA, 21 nt, synthetic construct
  source 1..21: mol_type = other RNA
  modified_base 1: mod_base = OTHER; note = 2'-O-methyl-adenosine-3'-thiophosphate-phosphate
  modified_base 2: mod_base = OTHER; note = 2'-fluoro-adenosine-3'-thiophosphate-phosphate
  modified_base 3: mod_base = OTHER; note = 2'-O-methyl-uridine-3'-phosphate
  modified_base 4: mod_base = OTHER; note = 2'-O-methyl-adenosine-3'-phosphate
  modified_base 5: mod_base = OTHER; note = 2'-O-methyl-adenosine-3'-phosphate
  modified_base 6: mod_base = OTHER; note = 2'-O-methyl-guanosine-3'-phosphate
  modified_base 7: mod_base = OTHER; note = 2'-O-methyl-cytidine-3'-phosphate
  modified_base 8: mod_base = OTHER; note = 2'-O-methyl-cytidine-3'-phosphate
  modified_base 9: mod_base = OTHER; note = 2'-O-methyl-adenosine-3'-phosphate
  modified_base 10: mod_base = OTHER; note = 2'-fluoro-guanosine-3'-phosphate
  modified_base 11: mod_base = OTHER; note = 2'-O-methyl-adenosine-3'-phosphate
  modified_base 12: mod_base = OTHER; note = 2'-O-methyl-guanosine-3'-phosphate
  modified_base 13: mod_base = OTHER; note = 2'-O-methyl-uridine-3'-phosphate
  modified_base 14: mod_base = OTHER; note = 2'-fluoro-cytidine-3'-phosphate
  modified_base 15: mod_base = OTHER; note = 2'-O-methyl-uridine-3'-phosphate
  modified_base 16: mod_base = OTHER; note = 2'-O-methyl-cytidine-3'-phosphate
  modified_base 17: mod_base = OTHER; note = 2'-O-methyl-adenosine-3'-phosphate
  modified_base 18: mod_base = OTHER; note = 2'-O-methyl-guanosine-3'-phosphate
  modified_base 19: mod_base = OTHER; note = 2'-O-methyl-cytidine-3'-thiophosphate-phosphate
  modified_base 20: mod_base = OTHER; note = 2'-O-methyl-cytidine-3'-thiophosphate-phosphate
  modified_base 21: mod_base = OTHER; note = 2'-O-methyl-adenosine-3'-phosphate
aataagccagagtctcagcca

SEQ ID NO: 1783 - RNA, 19 nt, synthetic construct
  source 1..19: mol_type = other RNA
  modified_base 1: mod_base = OTHER; note = 2'-O-methyl-guanosine-3'-thiophosphate-phosphate
  modified_base 2: mod_base = OTHER; note = 2'-O-methyl-cytidine-3'-thiophosphate-phosphate
  modified_base 3: mod_base = OTHER; note = 2'-O-methyl-uridine-3'-phosphate
  modified_base 4: mod_base = OTHER; note = 2'-O-methyl-guanosine-3'-phosphate
  modified_base 5: mod_base = OTHER; note = 2'-O-methyl-adenosine-3'-phosphate
  modified_base 6: mod_base = OTHER; note = 2'-O-methyl-guanosine-3'-phosphate
  modified_base 7: mod_base = OTHER; note = 2'-fluoro-adenosine-3'-phosphate
  modified_base 8: mod_base = OTHER; note = 2'-fluoro-cytidine-3'-phosphate
  modified_base 9: mod_base = OTHER; note = 2'-fluoro-uridine-3'-phosphate
  modified_base 10: mod_base = OTHER; note = 2'-O-methyl-cytidine-3'-phosphate
  modified_base 11: mod_base = OTHER; note = 2'-O-methyl-uridine-3'-phosphate
  modified_base 12: mod_base = OTHER; note = 2'-O-methyl-guanosine-3'-phosphate
  modified_base 13: mod_base = OTHER; note = 2'-O-methyl-guanosine-3'-phosphate
  modified_base 14: mod_base = OTHER; note = 2'-O-methyl-cytidine-3'-phosphate
  modified_base 15: mod_base = OTHER; note = 2'-O-methyl-uridine-3'-phosphate
  modified_base 16: mod_base = OTHER; note = 2'-O-methyl-uridine-3'-phosphate
  modified_base 17: mod_base = OTHER; note = 2'-O-methyl-adenosine-3'-phosphate
  modified_base 18: mod_base = OTHER; note = 2'-O-methyl-uridine-3'-phosphate
  modified_base 19: mod_base = OTHER; note = 2'-O-methyl-uridine-3'-phosphate
gctgagactctggcttatt

SEQ ID NO: 1784 - RNA, 21 nt, synthetic construct
  source 1..21: mol_type = other RNA
  modified_base 1: mod_base = OTHER; note = 2'-O-methyl-adenosine-3'-thiophosphate-phosphate
  modified_base 2: mod_base = OTHER; note = 2'-fluoro-adenosine-3'-thiophosphate-phosphate
  modified_base 3: mod_base = OTHER; note = 2'-O-methyl-uridine-3'-phosphate
  modified_base 4: mod_base = OTHER; note = 2'-O-methyl-adenosine-3'-phosphate
  modified_base 5: mod_base = OTHER; note = 2'-O-methyl-adenosine-3'-phosphate
  modified_base 6: mod_base = OTHER; note = 2'-O-methyl-guanosine-3'-phosphate
  modified_base 7: mod_base = OTHER; note = 2'-O-methyl-cytidine-3'-phosphate
  modified_base 8: mod_base = OTHER; note = 2'-O-methyl-cytidine-3'-phosphate
  modified_base 9: mod_base = OTHER; note = 2'-O-methyl-adenosine-3'-phosphate
  modified_base 10: mod_base = OTHER; note = 2'-O-methyl-guanosine-3'-phosphate
  modified_base 11: mod_base = OTHER; note = 2'-O-methyl-adenosine-3'-phosphate
  modified_base 12: mod_base = OTHER; note = 2'-O-methyl-guanosine-3'-phosphate
  modified_base 13: mod_base = OTHER; note = 2'-O-methyl-uridine-3'-phosphate
  modified_base 14: mod_base = OTHER; note = 2'-fluoro-cytidine-3'-phosphate
  modified_base 15: mod_base = OTHER; note = 2'-O-methyl-uridine-3'-phosphate
  modified_base 16: mod_base = OTHER; note = 2'-O-methyl-cytidine-3'-phosphate
  modified_base 17: mod_base = OTHER; note = 2'-O-methyl-adenosine-3'-phosphate
  modified_base 18: mod_base = OTHER; note = 2'-O-methyl-guanosine-3'-phosphate
  modified_base 19: mod_base = OTHER; note = 2'-O-methyl-guanosine-3'-thiophosphate-phosphate
  modified_base 20: mod_base = OTHER; note = 2'-O-methyl-cytidine-3'-thiophosphate-phosphate
  modified_base 21: mod_base = OTHER; note = 2'-O-methyl-adenosine-3'-phosphate
aataagccagagtctcaggca

SEQ ID NO: 1785 - RNA, 19 nt, synthetic construct
  source 1..19: mol_type = other RNA
  modified_base 1: mod_base = OTHER; note = inverted 2'-O-methyl-guanosine-3'-thiophosphate-phosphate
  modified_base 2: mod_base = OTHER; note = 2'-O-methyl-cytidine-3'-thiophosphate-phosphate
  modified_base 3: mod_base = OTHER; note = 2'-O-methyl-uridine-3'-phosphate
  modified_base 4: mod_base = OTHER; note = 2'-O-methyl-guanosine-3'-phosphate
  modified_base 5: mod_base = OTHER; note = 2'-O-methyl-adenosine-3'-phosphate
  modified_base 6: mod_base = OTHER; note = 2'-O-methyl-guanosine-3'-phosphate
  modified_base 7: mod_base = OTHER; note = 2'-fluoro-adenosine-3'-phosphate
  modified_base 8: mod_base = OTHER; note = 2'-fluoro-cytidine-3'-phosphate
  modified_base 9: mod_base = OTHER; note = 2'-fluoro-uridine-3'-phosphate
  modified_base 10: mod_base = OTHER; note = 2'-O-methyl-cytidine-3'-phosphate
  modified_base 11: mod_base = OTHER; note = 2'-O-methyl-uridine-3'-phosphate
  modified_base 12: mod_base = OTHER; note = 2'-O-methyl-guanosine-3'-phosphate
  modified_base 13: mod_base = OTHER; note = 2'-O-methyl-guanosine-3'-phosphate
  modified_base 14: mod_base = OTHER; note = 2'-O-methyl-cytidine-3'-phosphate
  modified_base 15: mod_base = OTHER; note = 2'-O-methyl-uridine-3'-phosphate
  modified_base 16: mod_base = OTHER; note = 2'-O-methyl-uridine-3'-phosphate
  modified_base 17: mod_base = OTHER; note = 2'-O-methyl-adenosine-3'-phosphate
  modified_base 18: mod_base = OTHER; note = 2'-O-methyl-uridine-3'-phosphate
  modified_base 19: mod_base = OTHER; note = 2'-O-methyl-uridine-3'-phosphate
gctgagactctggcttatt

SEQ ID NO: 1786 - RNA, 21 nt, synthetic construct
  source 1..21: mol_type = other RNA
  modified_base 1: mod_base = OTHER; note = 2'-O-methyl-adenosine-3'-thiophosphate-phosphate
  modified_base 2: mod_base = OTHER; note = 2'-fluoro-adenosine-3'-thiophosphate-phosphate
  modified_base 3: mod_base = OTHER; note = 2'-O-methyl-uridine-3'-phosphate
  modified_base 4: mod_base = OTHER; note = 2'-O-methyl-adenosine-3'-phosphate
  modified_base 5: mod_base = OTHER; note = 2'-O-methyl-adenosine-3'-phosphate
  modified_base 6: mod_base = OTHER; note = 2'-O-methyl-guanosine-3'-phosphate
  modified_base 7: mod_base = OTHER; note = 2'-O-methyl-cytidine-3'-phosphate
  modified_base 8: mod_base = OTHER; note = 2'-O-methyl-cytidine-3'-phosphate
  modified_base 9: mod_base = OTHER; note = 2'-O-methyl-adenosine-3'-phosphate
  modified_base 10: mod_base = OTHER; note = 2'-O-methyl-guanosine-3'-phosphate
  modified_base 11: mod_base = OTHER; note = 2'-O-methyl-adenosine-3'-phosphate
  modified_base 12: mod_base = OTHER; note = 2'-O-methyl-guanosine-3'-phosphate
  modified_base 13: mod_base = OTHER; note = 2'-O-methyl-uridine-3'-phosphate
  modified_base 14: mod_base = OTHER; note = 2'-fluoro-cytidine-3'-phosphate
  modified_base 15: mod_base = OTHER; note = 2'-O-methyl-uridine-3'-phosphate
  modified_base 16: mod_base = OTHER; note = 2'-O-methyl-cytidine-3'-phosphate
  modified_base 17: mod_base = OTHER; note = 2'-O-methyl-adenosine-3'-phosphate
  modified_base 18: mod_base = OTHER; note = 2'-O-methyl-guanosine-3'-phosphate
  modified_base 19: mod_base = OTHER; note = 2'-O-methyl-cytidine-3'-thiophosphate-phosphate
  modified_base 20: mod_base = OTHER; note = 2'-O-methyl-cytidine-3'-thiophosphate-phosphate
  modified_base 21: mod_base = OTHER; note = 2'-O-methyl-adenosine-3'-phosphate
aataagccagagtctcagcca

SEQ ID NO: 1787 - RNA, 19 nt, synthetic construct
  source 1..19: mol_type = other RNA
  modified_base 1: mod_base = OTHER; note = 2'-O-methyl-guanosine-3'-thiophosphate-phosphate
  modified_base 2: mod_base = OTHER; note = 2'-O-methyl-cytidine-3'-thiophosphate-phosphate
  modified_base 3: mod_base = OTHER; note = 2'-O-methyl-uridine-3'-phosphate
  modified_base 4: mod_base = OTHER; note = 2'-O-methyl-guanosine-3'-phosphate
  modified_base 5: mod_base = OTHER; note = 2'-O-methyl-adenosine-3'-phosphate
  modified_base 6: mod_base = OTHER; note = 2'-O-methyl-guanosine-3'-phosphate
  modified_base 7: mod_base = OTHER; note = 2'-fluoro-adenosine-3'-phosphate
  modified_base 8: mod_base = OTHER; note = 2'-fluoro-cytidine-3'-phosphate
  modified_base 9: mod_base = OTHER; note = 2'-fluoro-uridine-3'-phosphate
  modified_base 10: mod_base = OTHER; note = 2'-O-methyl-cytidine-3'-phosphate
  modified_base 11: mod_base = OTHER; note = 2'-O-methyl-uridine-3'-phosphate
  modified_base 12: mod_base = OTHER; note = 2'-O-methyl-guanosine-3'-phosphate
  modified_base 13: mod_base = OTHER; note = 2'-O-methyl-guanosine-3'-phosphate
  modified_base 14: mod_base = OTHER; note = 2'-O-methyl-cytidine-3'-phosphate
  modified_base 15: mod_base = OTHER; note = 2'-O-methyl-uridine-3'-phosphate
  modified_base 16: mod_base = OTHER; note = 2'-O-methyl-uridine-3'-phosphate
  modified_base 17: mod_base = OTHER; note = 2'-O-methyl-adenosine-3'-phosphate
  modified_base 18: mod_base = OTHER; note = 2'-O-methyl-uridine-3'-phosphate
  modified_base 19: mod_base = OTHER; note = 2'-O-methyl-uridine-3'-phosphate
gctgagactctggcttatt

SEQ ID NO: 1788 - RNA, 21 nt, synthetic construct
  source 1..21: mol_type = other RNA
  modified_base 1: mod_base = OTHER; note = 2'-O-methyl-adenosine-3'-thiophosphate-phosphate
  modified_base 2: mod_base = OTHER; note = 2'-fluoro-adenosine-3'-thiophosphate-phosphate
  modified_base 3: mod_base = OTHER; note = 2'-O-methyl-uridine-3'-phosphate
  modified_base 4: mod_base = OTHER; note = 2'-O-methyl-adenosine-3'-phosphate
  modified_base 5: mod_base = OTHER; note = 2'-O-methyl-adenosine-3'-phosphate
  modified_base 6: mod_base = OTHER; note = 2'-O-methyl-hypoxanthine-3'-phosphate
  modified_base 7: mod_base = OTHER; note = 2'-O-methyl-cytidine-3'-phosphate
  modified_base 8: mod_base = OTHER; note = 2'-O-methyl-cytidine-3'-phosphate
  modified_base 9: mod_base = OTHER; note = 2'-O-methyl-adenosine-3'-phosphate
  modified_base 10: mod_base = OTHER; note = 2'-O-methyl-guanosine-3'-phosphate
  modified_base 11: mod_base = OTHER; note = 2'-O-methyl-adenosine-3'-phosphate
  modified_base 12: mod_base = OTHER; note = 2'-O-methyl-guanosine-3'-phosphate
  modified_base 13: mod_base = OTHER; note = 2'-O-methyl-uridine-3'-phosphate
  modified_base 14: mod_base = OTHER; note = 2'-fluoro-cytidine-3'-phosphate
  modified_base 15: mod_base = OTHER; note = 2'-O-methyl-uridine-3'-phosphate
  modified_base 16: mod_base = OTHER; note = 2'-O-methyl-cytidine-3'-phosphate
  modified_base 17: mod_base = OTHER; note = 2'-O-methyl-adenosine-3'-phosphate
  modified_base 18: mod_base = OTHER; note = 2'-O-methyl-guanosine-3'-phosphate
  modified_base 19: mod_base = OTHER; note = 2'-O-methyl-cytidine-3'-thiophosphate-phosphate
  modified_base 20: mod_base = OTHER; note = 2'-O-methyl-cytidine-3'-thiophosphate-phosphate
  modified_base 21: mod_base = OTHER; note = 2'-O-methyl-adenosine-3'-phosphate
aataanccagagtctcagcca

SEQ ID NO: 1789 - RNA, 19 nt, synthetic construct
  source 1..19: mol_type = other RNA
  modified_base 1: mod_base = OTHER; note = inverted 2'-O-methyl-guanosine-3'-thiophosphate-phosphate
  modified_base 2: mod_base = OTHER; note = 2'-O-methyl-cytidine-3'-thiophosphate-phosphate
  modified_base 3: mod_base = OTHER; note = 2'-O-methyl-uridine-3'-phosphate
  modified_base 4: mod_base = OTHER; note = 2'-O-methyl-guanosine-3'-phosphate
  modified_base 5: mod_base = OTHER; note = 2'-O-methyl-adenosine-3'-phosphate
  modified_base 6: mod_base = OTHER; note = 2'-O-methyl-guanosine-3'-phosphate
  modified_base 7: mod_base = OTHER; note = 2'-fluoro-adenosine-3'-phosphate
  modified_base 8: mod_base = OTHER; note = 2'-fluoro-cytidine-3'-phosphate
  modified_base 9: mod_base = OTHER; note = 2'-fluoro-uridine-3'-phosphate
  modified_base 10: mod_base = OTHER; note = 2'-O-methyl-cytidine-3'-phosphate
  modified_base 11: mod_base = OTHER; note = 2'-O-methyl-uridine-3'-phosphate
  modified_base 12: mod_base = OTHER; note = 2'-O-methyl-guanosine-3'-phosphate
  modified_base 13: mod_base = OTHER; note = 2'-O-methyl-guanosine-3'-phosphate
  modified_base 14: mod_base = OTHER; note = 2'-O-methyl-cytidine-3'-phosphate
  modified_base 15: mod_base = OTHER; note = 2'-O-methyl-uridine-3'-phosphate
  modified_base 16: mod_base = OTHER; note = 2'-O-methyl-uridine-3'-phosphate
  modified_base 17: mod_base = OTHER; note = 2'-O-methyl-adenosine-3'-phosphate
  modified_base 18: mod_base = OTHER; note = 2'-O-methyl-uridine-3'-phosphate
  modified_base 19: mod_base = OTHER; note = 2'-O-methyl-uridine-3'-phosphate
gctgagactctggcttatt

SEQ ID NO: 1790 - RNA, 21 nt, synthetic construct
  source 1..21: mol_type = other RNA
  modified_base 1: mod_base = OTHER; note = 2'-O-methyl-adenosine-3'-thiophosphate-phosphate
  modified_base 2: mod_base = OTHER; note = 2'-fluoro-adenosine-3'-thiophosphate-phosphate
  modified_base 3: mod_base = OTHER; note = 2'-O-methyl-uridine-3'-phosphate
  modified_base 4: mod_base = OTHER; note = 2'-O-methyl-adenosine-3'-phosphate
  modified_base 5: mod_base = OTHER; note = 2'-O-methyl-adenosine-3'-phosphate
  modified_base 6: mod_base = OTHER; note = 2'-O-methyl-hypoxanthine-3'-phosphate
  modified_base 7: mod_base = OTHER; note = 2'-O-methyl-cytidine-3'-phosphate
  modified_base 8: mod_base = OTHER; note = 2'-O-methyl-cytidine-3'-phosphate
  modified_base 9: mod_base = OTHER; note = 2'-O-methyl-adenosine-3'-phosphate
  modified_base 10: mod_base = OTHER; note = 2'-O-methyl-guanosine-3'-phosphate
  modified_base 11: mod_base = OTHER; note = 2'-O-methyl-adenosine-3'-phosphate
  modified_base 12: mod_base = OTHER; note = 2'-O-methyl-guanosine-3'-phosphate
  modified_base 13: mod_base = OTHER; note = 2'-O-methyl-uridine-3'-phosphate
  modified_base 14: mod_base = OTHER; note = 2'-fluoro-cytidine-3'-phosphate
  modified_base 15: mod_base = OTHER; note = 2'-O-methyl-uridine-3'-phosphate
  modified_base 16: mod_base = OTHER; note = 2'-O-methyl-cytidine-3'-phosphate
  modified_base 17: mod_base = OTHER; note = 2'-O-methyl-adenosine-3'-phosphate
  modified_base 18: mod_base = OTHER; note = 2'-O-methyl-guanosine-3'-phosphate
  modified_base 19: mod_base = OTHER; note = 2'-O-methyl-cytidine-3'-thiophosphate-phosphate
  modified_base 20: mod_base = OTHER; note = 2'-O-methyl-cytidine-3'-thiophosphate-phosphate
  modified_base 21: mod_base = OTHER; note = 2'-O-methyl-adenosine-3'-phosphate
aataanccagagtctcagcca

SEQ ID NO: 1791 - RNA, 19 nt, synthetic construct
  source 1..19: mol_type = other RNA
  modified_base 1: mod_base = OTHER; note = inverted 2'-O-methyl-guanosine-3'-thiophosphate-phosphate
  modified_base 2: mod_base = OTHER; note = 2'-O-methyl-cytidine-3'-thiophosphate-phosphate
  modified_base 3: mod_base = OTHER; note = 2'-O-methyl-uridine-3'-phosphate
  modified_base 4: mod_base = OTHER; note = 2'-O-methyl-guanosine-3'-phosphate
  modified_base 5: mod_base = OTHER; note = 2'-O-methyl-adenosine-3'-phosphate
  modified_base 6: mod_base = OTHER; note = 2'-O-methyl-guanosine-3'-phosphate
  modified_base 7: mod_base = OTHER; note = 2'-fluoro-adenosine-3'-phosphate
  modified_base 8: mod_base = OTHER; note = 2'-fluoro-cytidine-3'-phosphate
  modified_base 9: mod_base = OTHER; note = 2'-fluoro-uridine-3'-phosphate
  modified_base 10: mod_base = OTHER; note = 2'-O-methyl-cytidine-3'-phosphate
  modified_base 11: mod_base = OTHER; note = 2'-O-methyl-uridine-3'-phosphate
  modified_base 12: mod_base = OTHER; note = 2'-O-methyl-guanosine-3'-phosphate
  modified_base 13: mod_base = OTHER; note = 2'-O-methyl-guanosine-3'-phosphate
  modified_base 14: mod_base = OTHER; note = 2'-O-methyl-cytidine-3'-phosphate
  modified_base 15: mod_base = OTHER; note = 2'-O-methyl-uridine-3'-phosphate
  modified_base 16: mod_base = OTHER; note = 2'-O-methyl-uridine-3'-phosphate
  modified_base 17: mod_base = OTHER; note = 2'-O-methyl-adenosine-3'-thiophosphate-phosphate
  modified_base 18: mod_base = OTHER; note = 2'-O-methyl-uridine-3'-thiophosphate-phosphate
  modified_base 19: mod_base = OTHER; note = 2'-O-methyl-uridine-3'-phosphate
gctgagactctggcttatt

SEQ ID NO: 1792 - RNA, 21 nt, synthetic construct
  source 1..21: mol_type = other RNA
  modified_base 1: mod_base = OTHER; note = 2'-O-methyl-adenosine-3'-thiophosphate-phosphate
  modified_base 2: mod_base = OTHER; note = 2'-fluoro-adenosine-3'-thiophosphate-phosphate
  modified_base 3: mod_base = OTHER; note = 2'-O-methyl-uridine-3'-phosphate
  modified_base 4: mod_base = OTHER; note = 2'-O-methyl-adenosine-3'-phosphate
  modified_base 5: mod_base = OTHER; note = 2'-O-methyl-adenosine-3'-phosphate
  modified_base 6: mod_base = OTHER; note = 2'-O-methyl-guanosine-3'-phosphate
  modified_base 7: mod_base = OTHER; note = 2'-O-methyl-cytidine-3'-phosphate
  modified_base 8: mod_base = OTHER; note = 2'-O-methyl-cytidine-3'-phosphate
  modified_base 9: mod_base = OTHER; note = 2'-O-methyl-adenosine-3'-phosphate
  modified_base 10: mod_base = OTHER; note = 2'-O-methyl-guanosine-3'-phosphate
  modified_base 11: mod_base = OTHER; note = 2'-O-methyl-adenosine-3'-phosphate
  modified_base 12: mod_base = OTHER; note = 2'-O-methyl-guanosine-3'-phosphate
  modified_base 13: mod_base = OTHER; note = 2'-O-methyl-uridine-3'-phosphate
  modified_base 14: mod_base = OTHER; note = 2'-fluoro-cytidine-3'-phosphate
  modified_base 15: mod_base = OTHER; note = 2'-O-methyl-uridine-3'-phosphate
  modified_base 16: mod_base = OTHER; note = 2'-O-methyl-cytidine-3'-phosphate
  modified_base 17: mod_base = OTHER; note = 2'-O-methyl-adenosine-3'-phosphate
  modified_base 18: mod_base = OTHER; note = 2'-O-methyl-guanosine-3'-phosphate
  modified_base 19: mod_base = OTHER; note = 2'-O-methyl-cytidine-3'-thiophosphate-phosphate
  modified_base 20: mod_base = OTHER; note = 2'-O-methyl-cytidine-3'-thiophosphate-phosphate
  modified_base 21: mod_base = OTHER; note = 2'-O-methyl-adenosine-3'-phosphate
aataagccagagtctcagcca

SEQ ID NO: 1793 - RNA, 21 nt, synthetic construct
  source 1..21: mol_type = other RNA
  modified_base 1: mod_base = OTHER; note = 2'-O-methyl-uridine-3'-thiophosphate-phosphate
  modified_base 2: mod_base = OTHER; note = 2'-O-methyl-guanosine-3'-thiophosphate-phosphate
  modified_base 3: mod_base = OTHER; note = 2'-O-methyl-guanosine-3'-phosphate
  modified_base 4: mod_base = OTHER; note = 2'-O-methyl-cytidine-3'-phosphate
  modified_base 5: mod_base = OTHER; note = 2'-O-methyl-uridine-3'-phosphate
  modified_base 6: mod_base = OTHER; note = 2'-O-methyl-guanosine-3'-phosphate
  modified_base 7: mod_base = OTHER; note = 2'-O-methyl-adenosine-3'-phosphate
  modified_base 8: mod_base = OTHER; note = 2'-O-methyl-guanosine-3'-phosphate
  modified_base 9: mod_base = OTHER; note = 2'-fluoro-adenosine-3'-phosphate
  modified_base 10: mod_base = OTHER; note = 2'-fluoro-cytidine-3'-phosphate
  modified_base 11: mod_base = OTHER; note = 2'-fluoro-uridine-3'-phosphate
  modified_base 12: mod_base = OTHER; note = 2'-O-methyl-cytidine-3'-phosphate
  modified_base 13: mod_base = OTHER; note = 2'-O-methyl-uridine-3'-phosphate
  modified_base 14: mod_base = OTHER; note = 2'-O-methyl-guanosine-3'-phosphate
  modified_base 15: mod_base = OTHER; note = 2'-O-methyl-guanosine-3'-phosphate
  modified_base 16: mod_base = OTHER; note = 2'-O-methyl-cytidine-3'-phosphate
  modified_base 17: mod_base = OTHER; note = 2'-O-methyl-uridine-3'-phosphate
  modified_base 18: mod_base = OTHER; note = 2'-O-methyl-uridine-3'-phosphate
  modified_base 19: mod_base = OTHER; note = 2'-O-methyl-adenosine-3'-thiophosphate-phosphate
  modified_base 20: mod_base = OTHER; note = 2'-O-methyl-uridine-3'-thiophosphate-phosphate
  modified_base 21: mod_base = OTHER; note = 2'-O-methyl-uridine-3'-phosphate
tggctgagactctggcttatt

SEQ ID NO: 1794 - RNA, 21 nt, synthetic construct
  source 1..21: mol_type = other RNA
  modified_base 1: mod_base = OTHER; note = 2'-O-methyl-adenosine-3'-thiophosphate-phosphate
  modified_base 2: mod_base = OTHER; note = 2'-fluoro-adenosine-3'-thiophosphate-phosphate
  modified_base 3: mod_base = OTHER; note = 2'-O-methyl-uridine-3'-phosphate
  modified_base 4: mod_base = OTHER; note = 2'-O-methyl-adenosine-3'-phosphate
  modified_base 5: mod_base = OTHER; note = 2'-O-methyl-adenosine-3'-phosphate
  modified_base 6: mod_base = OTHER; note = 2'-O-methyl-guanosine-3'-phosphate
  modified_base 7: mod_base = OTHER; note = 2'-O-methyl-cytidine-3'-phosphate
  modified_base 8: mod_base = OTHER; note = 2'-O-methyl-cytidine-3'-phosphate
  modified_base 9: mod_base = OTHER; note = 2'-O-methyl-adenosine-3'-phosphate
  modified_base 10: mod_base = OTHER; note = 2'-O-methyl-guanosine-3'-phosphate
  modified_base 11: mod_base = OTHER; note = 2'-O-methyl-adenosine-3'-phosphate
  modified_base 12: mod_base = OTHER; note = 2'-O-methyl-guanosine-3'-phosphate
  modified_base 13: mod_base = OTHER; note = 2'-O-methyl-uridine-3'-phosphate
  modified_base 14: mod_base = OTHER; note = 2'-fluoro-cytidine-3'-phosphate
  modified_base 15: mod_base = OTHER; note = 2'-O-methyl-uridine-3'-phosphate
  modified_base 16: mod_base = OTHER; note = 2'-O-methyl-cytidine-3'-phosphate
  modified_base 17: mod_base = OTHER; note = 2'-O-methyl-adenosine-3'-phosphate
  modified_base 18: mod_base = OTHER; note = 2'-O-methyl-guanosine-3'-phosphate
  modified_base 19: mod_base = OTHER; note = 2'-O-methyl-cytidine-3'-thiophosphate-phosphate
  modified_base 20: mod_base = OTHER; note = 2'-O-methyl-cytidine-3'-thiophosphate-phosphate
  modified_base 21: mod_base = OTHER; note = 2'-O-methyl-adenosine-3'-phosphate
aataagccagagtctcagcca

SEQ ID NO: 1795 - RNA, 21 nt, synthetic construct
  source 1..21: mol_type = other RNA
  modified_base 1: mod_base = OTHER; note = inverted 2'-O-methyl-uridine-3'-thiophosphate-phosphate
  modified_base 2: mod_base = OTHER; note = 2'-O-methyl-guanosine-3'-thiophosphate-phosphate
  modified_base 3: mod_base = OTHER; note = 2'-O-methyl-guanosine-3'-phosphate
  modified_base 4: mod_base = OTHER; note = 2'-O-methyl-cytidine-3'-phosphate
  modified_base 5: mod_base = OTHER; note = 2'-O-methyl-uridine-3'-phosphate
  modified_base 6: mod_base = OTHER; note = 2'-O-methyl-guanosine-3'-phosphate
  modified_base 7: mod_base = OTHER; note = 2'-O-methyl-adenosine-3'-phosphate
  modified_base 8: mod_base = OTHER; note = 2'-O-methyl-guanosine-3'-phosphate
  modified_base 9: mod_base = OTHER; note = 2'-fluoro-adenosine-3'-phosphate
  modified_base 10: mod_base = OTHER; note = 2'-fluoro-cytidine-3'-phosphate
  modified_base 11: mod_base = OTHER; note = 2'-fluoro-uridine-3'-phosphate
  modified_base 12: mod_base = OTHER; note = 2'-O-methyl-cytidine-3'-phosphate
  modified_base 13: mod_base = OTHER; note = 2'-O-methyl-uridine-3'-phosphate
  modified_base 14: mod_base = OTHER; note = 2'-O-methyl-guanosine-3'-phosphate
  modified_base 15: mod_base = OTHER; note = 2'-O-methyl-guanosine-3'-phosphate
  modified_base 16: mod_base = OTHER; note = 2'-O-methyl-cytidine-3'-phosphate
  modified_base 17: mod_base = OTHER; note = 2'-O-methyl-uridine-3'-phosphate
  modified_base 18: mod_base = OTHER; note = 2'-O-methyl-uridine-3'-phosphate
  modified_base 19: mod_base = OTHER; note = 2'-O-methyl-adenosine-3'-thiophosphate-phosphate
  modified_base 20: mod_base = OTHER; note = 2'-O-methyl-uridine-3'-thiophosphate-phosphate
  modified_base 21: mod_base = OTHER; note = 2'-O-methyl-uridine-3'-phosphate
tggctgagactctggcttatt

SEQ ID NO: 1796 - RNA, 21 nt, synthetic construct
  source 1..21: mol_type = other RNA
  modified_base 1: mod_base = OTHER; note = 2'-O-methyl-adenosine-3'-thiophosphate-phosphate
  modified_base 2: mod_base = OTHER; note = 2'-fluoro-adenosine-3'-thiophosphate-phosphate
  modified_base 3: mod_base = OTHER; note = 2'-O-methyl-uridine-3'-phosphate
  modified_base 4: mod_base = OTHER; note = 2'-O-methyl-adenosine-3'-phosphate
  modified_base 5: mod_base = OTHER; note = 2'-O-methyl-adenosine-3'-phosphate
  modified_base 6: mod_base = OTHER; note = 2'-O-methyl-guanosine-3'-phosphate
  modified_base 7: mod_base = OTHER; note = 2'-O-methyl-cytidine-3'-phosphate
  modified_base 8: mod_base = OTHER; note = 2'-O-methyl-cytidine-3'-phosphate
  modified_base 9: mod_base = OTHER; note = 2'-O-methyl-adenosine-3'-phosphate
  modified_base 10: mod_base = OTHER; note = 2'-O-methyl-guanosine-3'-phosphate
  modified_base 11: mod_base = OTHER; note = 2'-O-methyl-adenosine-3'-phosphate
  modified_base 12: mod_base = OTHER; note = 2'-O-methyl-guanosine-3'-phosphate
  modified_base 13: mod_base = OTHER; note = 2'-O-methyl-uridine-3'-phosphate
  modified_base 14: mod_base = OTHER; note = 2'-fluoro-cytidine-3'-phosphate
  modified_base 15: mod_base = OTHER; note = 2'-O-methyl-uridine-3'-phosphate
  modified_base 16: mod_base = OTHER; note = 2'-O-methyl-cytidine-3'-phosphate
  modified_base 17: mod_base = OTHER; note = 2'-O-methyl-adenosine-3'-phosphate
  modified_base 18: mod_base = OTHER; note = 2'-O-methyl-guanosine-3'-phosphate
  modified_base 19: mod_base = OTHER; note = 2'-O-methyl-cytidine-3'-thiophosphate-phosphate
  modified_base 20: mod_base = OTHER; note = 2'-O-methyl-cytidine-3'-thiophosphate-phosphate
  modified_base 21: mod_base = OTHER; note = 2'-O-methyl-adenosine-3'-phosphate
aataagccagagtctcagcca

SEQ ID NO: 1797 - RNA, 21 nt, synthetic construct
  source 1..21: mol_type = other RNA
  modified_base 1: mod_base = OTHER; note = 2'-O-methyl-uridine-3'-thiophosphate-phosphate
  modified_base 2: mod_base = OTHER; note = 2'-O-methyl-guanosine-3'-thiophosphate-phosphate
  modified_base 3: mod_base = OTHER; note = 2'-O-methyl-uridine-3'-phosphate
  modified_base 4: mod_base = OTHER; note = 2'-O-methyl-cytidine-3'-phosphate
  modified_base 5: mod_base = OTHER; note = 2'-O-methyl-uridine-3'-phosphate
  modified_base 6: mod_base = OTHER; note = 2'-O-methyl-guanosine-3'-phosphate
  modified_base 7: mod_base = OTHER; note = 2'-O-methyl-adenosine-3'-phosphate
  modified_base 8: mod_base = OTHER; note = 2'-O-methyl-guanosine-3'-phosphate
  modified_base 9: mod_base = OTHER; note = 2'-fluoro-adenosine-3'-phosphate
  modified_base 10: mod_base = OTHER; note = 2'-fluoro-cytidine-3'-phosphate
  modified_base 11: mod_base = OTHER; note = 2'-fluoro-uridine-3'-phosphate
  modified_base 12: mod_base = OTHER; note = 2'-O-methyl-cytidine-3'-phosphate
  modified_base 13: mod_base = OTHER; note = 2'-O-methyl-uridine-3'-phosphate
  modified_base 14: mod_base = OTHER; note = 2'-O-methyl-guanosine-3'-phosphate
  modified_base 15: mod_base = OTHER; note = 2'-O-methyl-guanosine-3'-phosphate
  modified_base 16: mod_base = OTHER; note = 2'-O-methyl-cytidine-3'-phosphate
  modified_base 17: mod_base = OTHER; note = 2'-O-methyl-uridine-3'-phosphate
  modified_base 18: mod_base = OTHER; note = 2'-O-methyl-uridine-3'-phosphate
  modified_base 19: mod_base = OTHER; note = 2'-O-methyl-adenosine-3'-thiophosphate-phosphate
  modified_base 20: mod_base = OTHER; note = 2'-O-methyl-uridine-3'-thiophosphate-phosphate
  modified_base 21: mod_base = OTHER; note = 2'-O-methyl-uridine-3'-phosphate
tgtctgagactctggcttatt

SEQ ID NO: 1798 - RNA, 21 nt, synthetic construct
  source 1..21: mol_type = other RNA
  modified_base 1: mod_base = OTHER; note = 2'-O-methyl-adenosine-3'-thiophosphate-phosphate
  modified_base 2: mod_base = OTHER; note = 2'-fluoro-adenosine-3'-thiophosphate-phosphate
  modified_base 3: mod_base = OTHER; note = 2'-O-methyl-uridine-3'-phosphate
  modified_base 4: mod_base = OTHER; note = 2'-O-methyl-adenosine-3'-phosphate
  modified_base 5: mod_base = OTHER; note = 2'-O-methyl-adenosine-3'-phosphate
  modified_base 6: mod_base = OTHER; note = 2'-O-methyl-guanosine-3'-phosphate
  modified_base 7: mod_base = OTHER; note = 2'-O-methyl-cytidine-3'-phosphate
  modified_base 8: mod_base = OTHER; note = 2'-O-methyl-cytidine-3'-phosphate
  modified_base 9: mod_base = OTHER; note = 2'-O-methyl-adenosine-3'-phosphate
  modified_base 10: mod_base = OTHER; note = 2'-O-methyl-guanosine-3'-phosphate
  modified_base 11: mod_base = OTHER; note = 2'-O-methyl-adenosine-3'-phosphate
  modified_base 12: mod_base = OTHER; note = 2'-O-methyl-guanosine-3'-phosphate
  modified_base 13: mod_base = OTHER; note = 2'-O-methyl-uridine-3'-phosphate
  modified_base 14: mod_base = OTHER; note = 2'-fluoro-cytidine-3'-phosphate
  modified_base 15: mod_base = OTHER; note = 2'-O-methyl-uridine-3'-phosphate
  modified_base 16: mod_base = OTHER; note = 2'-O-methyl-cytidine-3'-phosphate
  modified_base 17: mod_base = OTHER; note = 2'-O-methyl-adenosine-3'-phosphate
  modified_base 18: mod_base = OTHER; note = 2'-O-methyl-guanosine-3'-phosphate
  modified_base 19: mod_base = OTHER; note = 2'-O-methyl-adenosine-3'-thiophosphate-phosphate
  modified_base 20: mod_base = OTHER; note = 2'-O-methyl-cytidine-3'-thiophosphate-phosphate
  modified_base 21: mod_base = OTHER; note = 2'-O-methyl-adenosine-3'-phosphate
aataagccagagtctcagaca

SEQ ID NO: 1799 - RNA, 19 nt, synthetic construct
  source 1..19: mol_type = other RNA
  modified_base 1: mod_base = OTHER; note = 2'-O-methyl-guanosine-3'-thiophosphate-phosphate
  modified_base 2: mod_base = OTHER; note = 2'-O-methyl-cytidine-3'-thiophosphate-phosphate
  modified_base 3: mod_base = OTHER; note = 2'-O-methyl-uridine-3'-phosphate
  modified_base 4: mod_base = OTHER; note = 2'-O-methyl-guanosine-3'-phosphate
  modified_base 5: mod_base = OTHER; note = 2'-O-methyl-adenosine-3'-phosphate
  modified_base 6: mod_base = OTHER; note = 2'-O-methyl-guanosine-3'-phosphate
  modified_base 7: mod_base = OTHER; note = 2'-fluoro-adenosine-3'-phosphate
  modified_base 8: mod_base = OTHER; note = 2'-fluoro-cytidine-3'-phosphate
  modified_base 9: mod_base = OTHER; note = 2'-fluoro-uridine-3'-phosphate
  modified_base 10: mod_base = OTHER; note = 2'-O-methyl-cytidine-3'-phosphate
  modified_base 11: mod_base = OTHER; note = 2'-O-methyl-uridine-3'-phosphate
  modified_base 12: mod_base = OTHER; note = 2'-O-methyl-guanosine-3'-phosphate
  modified_base 13: mod_base = OTHER; note = 2'-O-methyl-guanosine-3'-phosphate
  modified_base 14: mod_base = OTHER; note = 2'-O-methyl-cytidine-3'-phosphate
  modified_base 15: mod_base = OTHER; note = 2'-O-methyl-uridine-3'-phosphate
  modified_base 16: mod_base = OTHER; note = 2'-O-methyl-uridine-3'-phosphate
  modified_base 17: mod_base = OTHER; note = 2'-O-methyl-adenosine-3'-thiophosphate-phosphate
  modified_base 18: mod_base = OTHER; note = 2'-O-methyl-uridine-3'-thiophosphate-phosphate
  modified_base 19: mod_base = OTHER; note = inverted 2'-O-methyl-uridine-3'-phosphate
gctgagactctggcttatt

SEQ ID NO: 1800 - RNA, 21 nt, synthetic construct
  source 1..21: mol_type = other RNA
  modified_base 1: mod_base = OTHER; note = 2'-O-methyl-adenosine-3'-thiophosphate-phosphate
  modified_base 2: mod_base = OTHER; note = 2'-fluoro-adenosine-3'-thiophosphate-phosphate
  modified_base 3: mod_base = OTHER; note = 2'-O-methyl-uridine-3'-phosphate
  modified_base 4: mod_base = OTHER; note = 2'-O-methyl-adenosine-3'-phosphate
  modified_base 5: mod_base = OTHER; note = 2'-O-methyl-adenosine-3'-phosphate
  modified_base 6: mod_base = OTHER; note = 2'-O-methyl-guanosine-3'-phosphate
  modified_base 7: mod_base = OTHER; note = 2'-O-methyl-cytidine-3'-phosphate
  modified_base 8: mod_base = OTHER; note = 2'-O-methyl-cytidine-3'-phosphate
  modified_base 9: mod_base = OTHER; note = 2'-O-methyl-adenosine-3'-phosphate
  modified_base 10: mod_base = OTHER; note = 2'-O-methyl-guanosine-3'-phosphate
  modified_base 11: mod_base = OTHER; note = 2'-O-methyl-adenosine-3'-phosphate
  modified_base 12: mod_base = OTHER; note = 2'-O-methyl-guanosine-3'-phosphate
  modified_base 13: mod_base = OTHER; note = 2'-O-methyl-uridine-3'-phosphate
  modified_base 14: mod_base = OTHER; note = 2'-fluoro-cytidine-3'-phosphate
  modified_base 15: mod_base = OTHER; note = 2'-O-methyl-uridine-3'-phosphate
  modified_base 16: mod_base = OTHER; note = 2'-O-methyl-cytidine-3'-phosphate
  modified_base 17: mod_base = OTHER; note = 2'-O-methyl-adenosine-3'-phosphate
  modified_base 18: mod_base = OTHER; note = 2'-O-methyl-guanosine-3'-phosphate
  modified_base 19: mod_base = OTHER; note = 2'-O-methyl-cytidine-3'-thiophosphate-phosphate
  modified_base 20: mod_base = OTHER; note = 2'-O-methyl-cytidine-3'-thiophosphate-phosphate
  modified_base 21: mod_base = OTHER; note = 2'-O-methyl-adenosine-3'-phosphate
aataagccagagtctcagcca

SEQ ID NO: 1801 - RNA, 19 nt, synthetic construct
  source 1..19: mol_type = other RNA
  modified_base 1: mod_base = OTHER; note = 2'-O-methyl-cytidine-3'-thiophosphate-phosphate
  modified_base 2: mod_base = OTHER; note = 2'-O-methyl-cytidine-3'-thiophosphate-phosphate
  modified_base 3: mod_base = OTHER; note = 2'-O-methyl-adenosine-3'-phosphate
  modified_base 4: mod_base = OTHER; note = 2'-O-methyl-uridine-3'-phosphate
  modified_base 5: mod_base = OTHER; note = 2'-O-methyl-cytidine-3'-phosphate
  modified_base 6: mod_base = OTHER; note = 2'-O-methyl-adenosine-3'-phosphate
  modified_base 7: mod_base = OTHER; note = 2'-fluoro-guanosine-3'-phosphate
  modified_base 8: mod_base = OTHER; note = 2'-fluoro-cytidine-3'-phosphate
  modified_base 9: mod_base = OTHER; note = 2'-fluoro-uridine-3'-phosphate
  modified_base 10: mod_base = OTHER; note = 2'-O-methyl-uridine-3'-phosphate
  modified_base 11: mod_base = OTHER; note = 2'-O-methyl-uridine-3'-phosphate
  modified_base 12: mod_base = OTHER; note = 2'-O-methyl-guanosine-3'-phosphate
  modified_base 13: mod_base = OTHER; note = 2'-O-methyl-cytidine-3'-phosphate
  modified_base 14: mod_base = OTHER; note = 2'-O-methyl-uridine-3'-phosphate
  modified_base 15: mod_base = OTHER; note = 2'-O-methyl-adenosine-3'-phosphate
  modified_base 16: mod_base = OTHER; note = 2'-O-methyl-cytidine-3'-phosphate
  modified_base 17: mod_base = OTHER; note = 2'-O-methyl-uridine-3'-phosphate
  modified_base 18: mod_base = OTHER; note = 2'-O-methyl-guanosine-3'-phosphate
  modified_base 19: mod_base = OTHER; note = 2'-O-methyl-uridine-3'-phosphate
ccatcagctttgctactgt

SEQ ID NO: 1802 - RNA, 21 nt, synthetic construct
  source 1..21: mol_type = other RNA
  modified_base 1: mod_base = OTHER; note = 2'-O-methyl-adenosine-3'-thiophosphate-phosphate
  modified_base 2: mod_base = OTHER; note = 2'-fluoro-cytidine-3'-thiophosphate-phosphate
  modified_base 3: mod_base = OTHER; note = 2'-O-methyl-adenosine-3'-phosphate
  modified_base 4: mod_base = OTHER; note = 2'-O-methyl-guanosine-3'-phosphate
  modified_base 5: mod_base = OTHER; note = 2'-O-methyl-uridine-3'-phosphate
  modified_base 6: mod_base = OTHER; note = 2'-O-methyl-adenosine-3'-phosphate
  modified_base 7: mod_base = OTHER; note = 2'-O-methyl-guanosine-3'-phosphate
  modified_base 8: mod_base = OTHER; note = 2'-O-methyl-cytidine-3'-phosphate
  modified_base 9: mod_base = OTHER; note = 2'-fluoro-adenosine-3'-phosphate
  modified_base 10: mod_base = OTHER; note = 2'-O-methyl-adenosine-3'-phosphate
  modified_base 11: mod_base = OTHER; note = 2'-O-methyl-adenosine-3'-phosphate
  modified_base 12: mod_base = OTHER; note = 2'-fluoro-guanosine-3'-phosphate
  modified_base 13: mod_base = OTHER; note = 2'-O-methyl-cytidine-3'-phosphate
  modified_base 14: mod_base = OTHER; note = 2'-fluoro-uridine-3'-phosphate
  modified_base 15: mod_base = OTHER; note = 2'-O-methyl-guanosine-3'-phosphate
  modified_base 16: mod_base = OTHER; note = 2'-O-methyl-adenosine-3'-phosphate
  modified_base 17: mod_base = OTHER; note = 2'-O-methyl-uridine-3'-phosphate
  modified_base 18: mod_base = OTHER; note = 2'-O-methyl-guanosine-3'-phosphate
  modified_base 19: mod_base = OTHER; note = 2'-O-methyl-guanosine-3'-thiophosphate-phosphate
  modified_base 20: mod_base = OTHER; note = 2'-O-methyl-uridine-3'-thiophosphate-phosphate
  modified_base 21: mod_base = OTHER; note = 2'-O-methyl-uridine-3'-phosphate
acagtagcaaagctgatggtt

SEQ ID NO: 1803 - RNA, 19 nt, synthetic construct
  source 1..19: mol_type = other RNA
  modified_base 1: mod_base = OTHER; note = 2'-O-methyl-cytidine-3'-thiophosphate-phosphate
  modified_base 2: mod_base = OTHER; note = 2'-O-methyl-cytidine-3'-thiophosphate-phosphate
  modified_base 3: mod_base = OTHER; note = 2'-O-methyl-adenosine-3'-phosphate
  modified_base 4: mod_base = OTHER; note = 2'-O-methyl-uridine-3'-phosphate
  modified_base 5: mod_base = OTHER; note = 2'-O-methyl-cytidine-3'-phosphate
  modified_base 6: mod_base = OTHER; note = 2'-O-methyl-adenosine-3'-phosphate
  modified_base 7: mod_base = OTHER; note = 2'-fluoro-guanosine-3'-phosphate
  modified_base 8: mod_base = OTHER; note = 2'-fluoro-cytidine-3'-phosphate
  modified_base 9: mod_base = OTHER; note = 2'-fluoro-uridine-3'-phosphate
  modified_base 10: mod_base = OTHER; note = 2'-O-methyl-uridine-3'-phosphate
  modified_base 11: mod_base = OTHER; note = 2'-O-methyl-uridine-3'-phosphate
  modified_base 12: mod_base = OTHER; note = 2'-O-methyl-guanosine-3'-phosphate
  modified_base 13: mod_base = OTHER; note = 2'-O-methyl-cytidine-3'-phosphate
  modified_base 14: mod_base = OTHER; note = 2'-O-methyl-uridine-3'-phosphate
  modified_base 15: mod_base = OTHER; note = 2'-O-methyl-adenosine-3'-phosphate
  modified_base 16: mod_base = OTHER; note = 2'-O-methyl-cytidine-3'-phosphate
  modified_base 17: mod_base = OTHER; note = 2'-O-methyl-uridine-3'-phosphate
  modified_base 18: mod_base = OTHER; note = 2'-O-methyl-guanosine-3'-phosphate
  modified_base 19: mod_base = OTHER; note = 2'-O-methyl-uridine-3'-phosphate
ccatcagctttgctactgt

SEQ ID NO: 1804 - RNA, 21 nt, synthetic construct
  source 1..21: mol_type = other RNA
  modified_base 1: mod_base = OTHER; note = 2'-O-methyl-adenosine-3'-thiophosphate-phosphate
  modified_base 2: mod_base = OTHER; note = 2'-fluoro-cytidine-3'-thiophosphate-phosphate
  modified_base 3: mod_base = OTHER; note = 2'-O-methyl-adenosine-3'-phosphate
  modified_base 4: mod_base = OTHER; note = 2'-O-methyl-guanosine-3'-phosphate
  modified_base 5: mod_base = OTHER; note = 2'-O-methyl-uridine-3'-phosphate
  modified_base 6: mod_base = OTHER; note = 2'-O-methyl-adenosine-3'-phosphate
  modified_base 7: mod_base = OTHER; note = 2'-O-methyl-guanosine-3'-phosphate
  modified_base 8: mod_base = OTHER; note = 2'-O-methyl-cytidine-3'-phosphate
  modified_base 9: mod_base = OTHER; note = 2'-fluoro-adenosine-3'-phosphate
  modified_base 10: mod_base = OTHER; note = 2'-O-methyl-adenosine-3'-phosphate
  modified_base 11: mod_base = OTHER; note = 2'-O-methyl-adenosine-3'-phosphate
  modified_base 12: mod_base = OTHER; note = 2'-fluoro-guanosine-3'-phosphate
  modified_base 13: mod_base = OTHER; note = 2'-O-methyl-cytidine-3'-phosphate
  modified_base 14: mod_base = OTHER; note = 2'-O-methyl-uridine-3'-phosphate
  modified_base 15: mod_base = OTHER; note = 2'-O-methyl-guanosine-3'-phosphate
  modified_base 16: mod_base = OTHER; note = 2'-O-methyl-adenosine-3'-phosphate
  modified_base 17: mod_base = OTHER; note = 2'-O-methyl-uridine-3'-phosphate
  modified_base 18: mod_base = OTHER; note = 2'-O-methyl-guanosine-3'-phosphate
  modified_base 19: mod_base = OTHER; note = 2'-O-methyl-guanosine-3'-thiophosphate-phosphate
  modified_base 20: mod_base = OTHER; note = 2'-O-methyl-uridine-3'-thiophosphate-phosphate
  modified_base 21: mod_base = OTHER; note = 2'-O-methyl-uridine-3'-phosphate
acagtagcaaagctgatggtt

SEQ ID NO: 1805 - RNA, 19 nt, synthetic construct
  source 1..19: mol_type = other RNA
  modified_base 1: mod_base = OTHER; note = 2'-O-methyl-cytidine-3'-thiophosphate-phosphate
  modified_base 2: mod_base = OTHER; note = 2'-O-methyl-cytidine-3'-thiophosphate-phosphate
  modified_base 3: mod_base = OTHER; note = 2'-O-methyl-adenosine-3'-phosphate
  modified_base 4: mod_base = OTHER; note = 2'-O-methyl-uridine-3'-phosphate
  modified_base 5: mod_base = OTHER; note = 2'-O-methyl-cytidine-3'-phosphate
  modified_base 6: mod_base = OTHER; note = 2'-O-methyl-adenosine-3'-phosphate
  modified_base 7: mod_base = OTHER; note = 2'-fluoro-guanosine-3'-phosphate
  modified_base 8: mod_base = OTHER; note = 2'-fluoro-cytidine-3'-phosphate
  modified_base 9: mod_base = OTHER; note = 2'-fluoro-uridine-3'-phosphate
  modified_base 10: mod_base = OTHER; note = 2'-O-methyl-uridine-3'-phosphate
  modified_base 11: mod_base = OTHER; note = 2'-O-methyl-uridine-3'-phosphate
  modified_base 12: mod_base = OTHER; note = 2'-O-methyl-guanosine-3'-phosphate
  modified_base 13: mod_base = OTHER; note = 2'-O-methyl-cytidine-3'-phosphate
  modified_base 14: mod_base = OTHER; note = 2'-O-methyl-uridine-3'-phosphate
  modified_base 15: mod_base = OTHER; note = 2'-O-methyl-adenosine-3'-phosphate
  modified_base 16: mod_base = OTHER; note = 2'-O-methyl-cytidine-3'-phosphate
  modified_base 17: mod_base = OTHER; note = 2'-O-methyl-uridine-3'-phosphate
  modified_base 18: mod_base = OTHER; note = 2'-O-methyl-guanosine-3'-phosphate
  modified_base 19: mod_base = OTHER; note = 2'-O-methyl-uridine-3'-phosphate
ccatcagctttgctactgt

SEQ ID NO: 1806 - RNA, 21 nt, synthetic construct
  source 1..21: mol_type = other RNA
  modified_base 1: mod_base = OTHER; note = 2'-O-methyl-adenosine-3'-thiophosphate-phosphate
  modified_base 2: mod_base = OTHER; note = 2'-fluoro-cytidine-3'-thiophosphate-phosphate
  modified_base 3: mod_base = OTHER; note = 2'-O-methyl-adenosine-3'-phosphate
  modified_base 4: mod_base = OTHER; note = 2'-O-methyl-guanosine-3'-phosphate
  modified_base 5: mod_base = OTHER; note = 2'-O-methyl-uridine-3'-phosphate
  modified_base 6: mod_base = OTHER; note = 2'-O-methyl-adenosine-3'-phosphate
  modified_base 7: mod_base = OTHER; note = 2'-O-methyl-guanosine-3'-phosphate
  modified_base 8: mod_base = OTHER; note = 2'-fluoro-cytidine-3'-phosphate
  modified_base 9: mod_base = OTHER; note = 2'-fluoro-adenosine-3'-phosphate
  modified_base 10: mod_base = OTHER; note = 2'-O-methyl-adenosine-3'-phosphate
  modified_base 11: mod_base = OTHER; note = 2'-O-methyl-adenosine-3'-phosphate
  modified_base 12: mod_base = OTHER; note = 2'-fluoro-guanosine-3'-phosphate
  modified_base 13: mod_base = OTHER; note = 2'-O-methyl-cytidine-3'-phosphate
  modified_base 14: mod_base = OTHER; note = 2'-fluoro-uridine-3'-phosphate
  modified_base 15: mod_base = OTHER; note = 2'-O-methyl-guanosine-3'-phosphate
  modified_base 16: mod_base = OTHER; note = 2'-O-methyl-adenosine-3'-phosphate
  modified_base 17: mod_base = OTHER; note = 2'-O-methyl-uridine-3'-phosphate
  modified_base 18: mod_base = OTHER; note = 2'-O-methyl-guanosine-3'-phosphate
  modified_base 19: mod_base = OTHER; note = 2'-O-methyl-guanosine-3'-thiophosphate-phosphate
  modified_base 20: mod_base = OTHER; note = 2'-O-methyl-uridine-3'-thiophosphate-phosphate
  modified_base 21: mod_base = OTHER; note = 2'-O-methyl-uridine-3'-phosphate
acagtagcaaagctgatggtt

SEQ ID NO: 1807 - RNA, 19 nt, synthetic construct
  source 1..19: mol_type = other RNA
  modified_base 1: mod_base = OTHER; note = 2'-O-methyl-cytidine-3'-thiophosphate-phosphate
  modified_base 2: mod_base = OTHER; note = 2'-O-methyl-cytidine-3'-thiophosphate-phosphate
  modified_base 3: mod_base = OTHER; note = 2'-O-methyl-adenosine-3'-phosphate
  modified_base 4: mod_base = OTHER; note = 2'-O-methyl-uridine-3'-phosphate
  modified_base 5: mod_base = OTHER; note = 2'-O-methyl-cytidine-3'-phosphate
  modified_base 6: mod_base = OTHER; note = 2'-O-methyl-adenosine-3'-phosphate
  modified_base 7: mod_base = OTHER; note = 2'-fluoro-guanosine-3'-phosphate
  modified_base 8: mod_base = OTHER; note = 2'-fluoro-cytidine-3'-phosphate
  modified_base 9: mod_base = OTHER; note = 2'-fluoro-uridine-3'-phosphate
  modified_base 10: mod_base = OTHER; note = 2'-O-methyl-uridine-3'-phosphate
  modified_base 11: mod_base = OTHER; note = 2'-O-methyl-uridine-3'-phosphate
  modified_base 12: mod_base = OTHER; note = 2'-O-methyl-guanosine-3'-phosphate
  modified_base 13: mod_base = OTHER; note = 2'-O-methyl-cytidine-3'-phosphate
  modified_base 14: mod_base = OTHER; note = 2'-O-methyl-uridine-3'-phosphate
  modified_base 15: mod_base = OTHER; note = 2'-O-methyl-adenosine-3'-phosphate
  modified_base 16: mod_base = OTHER; note = 2'-O-methyl-cytidine-3'-phosphate
  modified_base 17: mod_base = OTHER; note = 2'-O-methyl-uridine-3'-phosphate
  modified_base 18: mod_base = OTHER; note = 2'-O-methyl-guanosine-3'-phosphate
  modified_base 19: mod_base = OTHER; note = 2'-O-methyl-uridine-3'-phosphate
ccatcagctttgctactgt

SEQ ID NO: 1808 - RNA, 21 nt, synthetic construct
  source 1..21: mol_type = other RNA
  modified_base 1: mod_base = OTHER; note = 2'-O-methyl-adenosine-3'-thiophosphate-phosphate
  modified_base 2: mod_base = OTHER; note = 2'-fluoro-cytidine-3'-thiophosphate-phosphate
  modified_base 3: mod_base = OTHER; note = 2'-O-methyl-adenosine-3'-phosphate
  modified_base 4: mod_base = OTHER; note = 2'-O-methyl-guanosine-3'-phosphate
  modified_base 5: mod_base = OTHER; note = 2'-O-methyl-uridine-3'-phosphate
  modified_base 6: mod_base = OTHER; note = 2'-O-methyl-adenosine-3'-phosphate
  modified_base 7: mod_base = OTHER; note = 2'-O-methyl-guanosine-3'-phosphate
  modified_base 8: mod_base = OTHER; note = 2'-fluoro-cytidine-3'-phosphate
  modified_base 9: mod_base = OTHER; note = 2'-fluoro-adenosine-3'-phosphate
  modified_base 10: mod_base = OTHER; note = 2'-O-methyl-adenosine-3'-phosphate
  modified_base 11: mod_base = OTHER; note = 2'-O-methyl-adenosine-3'-phosphate
  modified_base 12: mod_base = OTHER; note = 2'-fluoro-guanosine-3'-phosphate
  modified_base 13: mod_base = OTHER; note = 2'-O-methyl-cytidine-3'-phosphate
  modified_base 14: mod_base = OTHER; note = 2'-O-methyl-uridine-3'-phosphate
  modified_base 15: mod_base = OTHER; note = 2'-O-methyl-guanosine-3'-phosphate
  modified_base 16: mod_base = OTHER; note = 2'-O-methyl-adenosine-3'-phosphate
  modified_base 17: mod_base = OTHER; note = 2'-O-methyl-uridine-3'-phosphate
  modified_base 18: mod_base = OTHER; note = 2'-O-methyl-guanosine-3'-phosphate
  modified_base 19: mod_base = OTHER; note = 2'-O-methyl-guanosine-3'-thiophosphate-phosphate
  modified_base 20: mod_base = OTHER; note = 2'-O-methyl-uridine-3'-thiophosphate-phosphate
  modified_base 21: mod_base = OTHER; note = 2'-O-methyl-uridine-3'-phosphate
acagtagcaaagctgatggtt

SEQ ID NO: 1809 - RNA, 19 nt, synthetic construct
  source 1..19: mol_type = other RNA
  modified_base 1: mod_base = OTHER; note = 2'-O-methyl-cytidine-3'-thiophosphate-phosphate
  modified_base 2: mod_base = OTHER; note = 2'-O-methyl-cytidine-3'-thiophosphate-phosphate
  modified_base 3: mod_base = OTHER; note = 2'-O-methyl-adenosine-3'-phosphate
  modified_base 4: mod_base = OTHER; note = 2'-O-methyl-uridine-3'-phosphate
  modified_base 5: mod_base = OTHER; note = 2'-O-methyl-cytidine-3'-phosphate
  modified_base 6: mod_base = OTHER; note = 2'-O-methyl-adenosine-3'-phosphate
  modified_base 7: mod_base = OTHER; note = 2'-fluoro-guanosine-3'-phosphate
  modified_base 8: mod_base = OTHER; note = 2'-fluoro-cytidine-3'-phosphate
  modified_base 9: mod_base = OTHER; note = 2'-fluoro-uridine-3'-phosphate
  modified_base 10: mod_base = OTHER; note = 2'-O-methyl-uridine-3'-phosphate
  modified_base 11: mod_base = OTHER; note = 2'-O-methyl-uridine-3'-phosphate
  modified_base 12: mod_base = OTHER; note = 2'-O-methyl-guanosine-3'-phosphate
  modified_base 13: mod_base = OTHER; note = 2'-O-methyl-cytidine-3'-phosphate
  modified_base 14: mod_base = OTHER; note = 2'-O-methyl-uridine-3'-phosphate
  modified_base 15: mod_base = OTHER; note = 2'-O-methyl-adenosine-3'-phosphate
  modified_base 16: mod_base = OTHER; note = 2'-O-methyl-cytidine-3'-phosphate
  modified_base 17: mod_base = OTHER; note = 2'-O-methyl-uridine-3'-thiophosphate-phosphate
  modified_base 18: mod_base = OTHER; note = 2'-O-methyl-guanosine-3'-thiophosphate-phosphate
  modified_base 19: mod_base = OTHER; note = 2'-O-methyl-uridine-3'-phosphate
ccatcagctttgctactgt

SEQ ID NO: 1810 - RNA, 21 nt, synthetic construct
  source 1..21: mol_type = other RNA
  modified_base 1: mod_base = OTHER; note = 2'-O-methyl-adenosine-3'-thiophosphate-phosphate
  modified_base 2: mod_base = OTHER; note = 2'-fluoro-cytidine-3'-thiophosphate-phosphate
  modified_base 3: mod_base = OTHER; note = 2'-O-methyl-adenosine-3'-phosphate
  modified_base 4: mod_base = OTHER; note = 2'-O-methyl-guanosine-3'-phosphate
  modified_base 5: mod_base = OTHER; note = 2'-O-methyl-uridine-3'-phosphate
  modified_base 6: mod_base = OTHER; note = 2'-O-methyl-adenosine-3'-phosphate
  modified_base 7: mod_base = OTHER; note = 2'-O-methyl-guanosine-3'-phosphate
  modified_base 8: mod_base = OTHER; note = 2'-O-methyl-cytidine-3'-phosphate
  modified_base 9: mod_base = OTHER; note = 2'-fluoro-adenosine-3'-phosphate
  modified_base 10: mod_base = OTHER; note = 2'-O-methyl-adenosine-3'-phosphate
  modified_base 11: mod_base = OTHER; note = 2'-O-methyl-adenosine-3'-phosphate
  modified_base 12: mod_base = OTHER; note = 2'-fluoro-guanosine-3'-phosphate
  modified_base 13: mod_base = OTHER; note = 2'-O-methyl-cytidine-3'-phosphate
  modified_base 14: mod_base = OTHER; note = 2'-fluoro-uridine-3'-phosphate
  modified_base 15: mod_base = OTHER; note = 2'-O-methyl-guanosine-3'-phosphate
  modified_base 16: mod_base = OTHER; note = 2'-O-methyl-adenosine-3'-phosphate
  modified_base 17: mod_base = OTHER; note = 2'-O-methyl-uridine-3'-phosphate
  modified_base 18: mod_base = OTHER; note = 2'-O-methyl-guanosine-3'-phosphate
  modified_base 19: mod_base = OTHER; note = 2'-O-methyl-guanosine-3'-thiophosphate-phosphate
  modified_base 20: mod_base = OTHER; note = 2'-O-methyl-uridine-3'-thiophosphate-phosphate
  modified_base 21: mod_base = OTHER; note = 2'-O-methyl-uridine-3'-phosphate
acagtagcaaagctgatggtt

SEQ ID NO: 1811 - RNA, 19 nt, synthetic construct
  source 1..19: mol_type = other RNA
  modified_base 1: mod_base = OTHER; note = inverted 2'-O-methyl-cytidine-3'-thiophosphate-phosphate
  modified_base 2: mod_base = OTHER; note = 2'-O-methyl-cytidine-3'-thiophosphate-phosphate
  modified_base 3: mod_base = OTHER; note = 2'-O-methyl-adenosine-3'-phosphate
  modified_base 4: mod_base = OTHER; note = 2'-O-methyl-uridine-3'-phosphate
  modified_base 5: mod_base = OTHER; note = 2'-O-methyl-cytidine-3'-phosphate
  modified_base 6: mod_base = OTHER; note = 2'-O-methyl-adenosine-3'-phosphate
  modified_base 7: mod_base = OTHER; note = 2'-fluoro-guanosine-3'-phosphate
  modified_base 8: mod_base = OTHER; note = 2'-fluoro-cytidine-3'-phosphate
  modified_base 9: mod_base = OTHER; note = 2'-fluoro-uridine-3'-phosphate
  modified_base 10: mod_base = OTHER; note = 2'-O-methyl-uridine-3'-phosphate
  modified_base 11: mod_base = OTHER; note = 2'-O-methyl-uridine-3'-phosphate
  modified_base 12: mod_base = OTHER; note = 2'-O-methyl-guanosine-3'-phosphate
  modified_base 13: mod_base = OTHER; note = 2'-O-methyl-cytidine-3'-phosphate
  modified_base 14: mod_base = OTHER; note = 2'-O-methyl-uridine-3'-phosphate
  modified_base 15: mod_base = OTHER; note = 2'-O-methyl-adenosine-3'-phosphate
  modified_base 16: mod_base = OTHER; note = 2'-O-methyl-cytidine-3'-phosphate
  modified_base 17: mod_base = OTHER; note = 2'-O-methyl-uridine-3'-thiophosphate-phosphate
  modified_base 18: mod_base = OTHER; note = 2'-O-methyl-guanosine-3'-thiophosphate-phosphate
  modified_base 19: mod_base = OTHER; note = 2'-O-methyl-uridine-3'-phosphate
ccatcagctttgctactgt

SEQ ID NO: 1812 - RNA, 21 nt, synthetic construct
  source 1..21: mol_type = other RNA
  modified_base 1: mod_base = OTHER; note = 2'-O-methyl-adenosine-3'-thiophosphate-phosphate
  modified_base 2: mod_base = OTHER; note = 2'-fluoro-cytidine-3'-thiophosphate-phosphate
  modified_base 3: mod_base = OTHER; note = 2'-O-methyl-adenosine-3'-phosphate
  modified_base 4: mod_base = OTHER; note = 2'-O-methyl-guanosine-3'-phosphate
  modified_base 5: mod_base = OTHER; note = 2'-O-methyl-uridine-3'-phosphate
  modified_base 6: mod_base = OTHER; note = 2'-O-methyl-adenosine-3'-phosphate
  modified_base 7: mod_base = OTHER; note = 2'-O-methyl-guanosine-3'-phosphate
  modified_base 8: mod_base = OTHER; note = 2'-O-methyl-cytidine-3'-phosphate
  modified_base 9: mod_base = OTHER; note = 2'-fluoro-adenosine-3'-phosphate
  modified_base 10: mod_base = OTHER; note = 2'-O-methyl-adenosine-3'-phosphate
  modified_base 11: mod_base = OTHER; note = 2'-O-methyl-adenosine-3'-phosphate
  modified_base 12: mod_base = OTHER; note = 2'-fluoro-guanosine-3'-phosphate
  modified_base 13: mod_base = OTHER; note = 2'-O-methyl-cytidine-3'-phosphate
  modified_base 14: mod_base = OTHER; note = 2'-fluoro-uridine-3'-phosphate
  modified_base 15: mod_base = OTHER; note = 2'-O-methyl-guanosine-3'-phosphate
  modified_base 16: mod_base = OTHER; note = 2'-O-methyl-adenosine-3'-phosphate
  modified_base 17: mod_base = OTHER; note = 2'-O-methyl-uridine-3'-phosphate
  modified_base 18: mod_base = OTHER; note = 2'-O-methyl-guanosine-3'-phosphate
  modified_base 19: mod_base = OTHER; note = 2'-O-methyl-guanosine-3'-thiophosphate-phosphate
  modified_base 20: mod_base = OTHER; note = 2'-O-methyl-uridine-3'-thiophosphate-phosphate
  modified_base 21: mod_base = OTHER; note = 2'-O-methyl-uridine-3'-phosphate
acagtagcaaagctgatggtt

SEQ ID NO: 1813 - RNA, 21 nt, synthetic construct
  source 1..21: mol_type = other RNA
  modified_base 1: mod_base = OTHER; note = 2'-O-methyl-adenosine-3'-thiophosphate-phosphate
  modified_base 2: mod_base = OTHER; note = 2'-O-methyl-adenosine-3'-thiophosphate-phosphate
  modified_base 3: mod_base = OTHER; note = 2'-O-methyl-cytidine-3'-phosphate
  modified_base 4: mod_base = OTHER; note = 2'-O-methyl-cytidine-3'-phosphate
  modified_base 5: mod_base = OTHER; note = 2'-O-methyl-adenosine-3'-phosphate
  modified_base 6: mod_base = OTHER; note = 2'-O-methyl-uridine-3'-phosphate
  modified_base 7: mod_base = OTHER; note = 2'-O-methyl-cytidine-3'-phosphate
  modified_base 8: mod_base = OTHER; note = 2'-O-methyl-adenosine-3'-phosphate
  modified_base 9: mod_base = OTHER; note = 2'-fluoro-guanosine-3'-phosphate
  modified_base 10: mod_base = OTHER; note = 2'-fluoro-cytidine-3'-phosphate
  modified_base 11: mod_base = OTHER; note = 2'-fluoro-uridine-3'-phosphate
  modified_base 12: mod_base = OTHER; note = 2'-O-methyl-uridine-3'-phosphate
  modified_base 13: mod_base = OTHER; note = 2'-O-methyl-uridine-3'-phosphate
  modified_base 14: mod_base = OTHER; note = 2'-O-methyl-guanosine-3'-phosphate
  modified_base 15: mod_base = OTHER; note = 2'-O-methyl-cytidine-3'-phosphate
  modified_base 16: mod_base = OTHER; note = 2'-O-methyl-uridine-3'-phosphate
  modified_base 17: mod_base = OTHER; note = 2'-O-methyl-adenosine-3'-phosphate
  modified_base 18: mod_base = OTHER; note = 2'-O-methyl-cytidine-3'-phosphate
  modified_base 19: mod_base = OTHER; note = 2'-O-methyl-uridine-3'-thiophosphate-phosphate
  modified_base 20: mod_base = OTHER; note = 2'-O-methyl-guanosine-3'-thiophosphate-phosphate
  modified_base 21: mod_base = OTHER; note = 2'-O-methyl-uridine-3'-phosphate
aaccatcagctttgctactgt

SEQ ID NO: 1814 - RNA, 21 nt, synthetic construct
  source 1..21: mol_type = other RNA
  modified_base 1: mod_base = OTHER; note = 2'-O-methyl-adenosine-3'-thiophosphate-phosphate
  modified_base 2: mod_base = OTHER; note = 2'-fluoro-cytidine-3'-thiophosphate-phosphate
  modified_base 3: mod_base = OTHER; note = 2'-O-methyl-adenosine-3'-phosphate
  modified_base 4: mod_base = OTHER; note = 2'-O-methyl-guanosine-3'-phosphate
  modified_base 5: mod_base = OTHER; note = 2'-O-methyl-uridine-3'-phosphate
  modified_base 6: mod_base = OTHER; note = 2'-O-methyl-adenosine-3'-phosphate
  modified_base 7: mod_base = OTHER; note = 2'-O-methyl-guanosine-3'-phosphate
  modified_base 8: mod_base = OTHER; note = 2'-O-methyl-cytidine-3'-phosphate
  modified_base 9: mod_base = OTHER; note = 2'-fluoro-adenosine-3'-phosphate
  modified_base 10: mod_base = OTHER; note = 2'-O-methyl-adenosine-3'-phosphate
  modified_base 11: mod_base = OTHER; note = 2'-O-methyl-adenosine-3'-phosphate
  modified_base 12: mod_base = OTHER; note = 2'-fluoro-guanosine-3'-phosphate
  modified_base 13: mod_base = OTHER; note = 2'-O-methyl-cytidine-3'-phosphate
  modified_base 14: mod_base = OTHER; note = 2'-fluoro-uridine-3'-phosphate
  modified_base 15: mod_base = OTHER; note = 2'-O-methyl-guanosine-3'-phosphate
  modified_base 16: mod_base = OTHER; note = 2'-O-methyl-adenosine-3'-phosphate
  modified_base 17: mod_base = OTHER; note = 2'-O-methyl-uridine-3'-phosphate
  modified_base 18: mod_base = OTHER; note = 2'-O-methyl-guanosine-3'-phosphate
  modified_base 19: mod_base = OTHER; note = 2'-O-methyl-guanosine-3'-thiophosphate-phosphate
  modified_base 20: mod_base = OTHER; note = 2'-O-methyl-uridine-3'-thiophosphate-phosphate
  modified_base 21: mod_base = OTHER; note = 2'-O-methyl-uridine-3'-phosphate
acagtagcaaagctgatggtt

SEQ ID NO: 1815 - RNA, 21 nt, synthetic construct
  source 1..21: mol_type = other RNA
  modified_base 1: mod_base = OTHER; note = inverted 2'-O-methyl-adenosine-3'-thiophosphate-phosphate
  modified_base 2: mod_base = OTHER; note = 2'-O-methyl-adenosine-3'-thiophosphate-phosphate
  modified_base 3: mod_base = OTHER; note = 2'-O-methyl-cytidine-3'-phosphate
  modified_base 4: mod_base = OTHER; note = 2'-O-methyl-cytidine-3'-phosphate
  modified_base 5: mod_base = OTHER; note = 2'-O-methyl-adenosine-3'-phosphate
  modified_base 6: mod_base = OTHER; note = 2'-O-methyl-uridine-3'-phosphate
  modified_base 7: mod_base = OTHER; note = 2'-O-methyl-cytidine-3'-phosphate
  modified_base 8: mod_base = OTHER; note = 2'-O-methyl-adenosine-3'-phosphate
  modified_base 9: mod_base = OTHER; note = 2'-fluoro-guanosine-3'-phosphate
  modified_base 10: mod_base = OTHER; note = 2'-fluoro-cytidine-3'-phosphate
  modified_base 11: mod_base = OTHER; note = 2'-fluoro-uridine-3'-phosphate
  modified_base 12: mod_base = OTHER; note = 2'-O-methyl-uridine-3'-phosphate
  modified_base 13: mod_base = OTHER; note = 2'-O-methyl-uridine-3'-phosphate
  modified_base 14: mod_base = OTHER; note = 2'-O-methyl-guanosine-3'-phosphate
  modified_base 15: mod_base = OTHER; note = 2'-O-methyl-cytidine-3'-phosphate
  modified_base 16: mod_base = OTHER; note = 2'-O-methyl-uridine-3'-phosphate
  modified_base 17: mod_base = OTHER; note = 2'-O-methyl-adenosine-3'-phosphate
  modified_base 18: mod_base = OTHER; note = 2'-O-methyl-cytidine-3'-phosphate
  modified_base 19: mod_base = OTHER; note = 2'-O-methyl-uridine-3'-thiophosphate-phosphate
  modified_base 20: mod_base = OTHER; note = 2'-O-methyl-guanosine-3'-thiophosphate-phosphate
  modified_base 21: mod_base = OTHER; note = 2'-O-methyl-uridine-3'-phosphate
aaccatcagctttgctactgt

SEQ ID NO: 1816 - RNA, 21 nt, synthetic construct
  source 1..21: mol_type = other RNA
  modified_base 1: mod_base = OTHER; note = 2'-O-methyl-adenosine-3'-thiophosphate-phosphate
  modified_base 2: mod_base = OTHER; note = 2'-fluoro-cytidine-3'-thiophosphate-phosphate
  modified_base 3: mod_base = OTHER; note = 2'-O-methyl-adenosine-3'-phosphate
  modified_base 4: mod_base = OTHER; note = 2'-O-methyl-guanosine-3'-phosphate
  modified_base 5: mod_base = OTHER; note = 2'-O-methyl-uridine-3'-phosphate
  modified_base 6: mod_base = OTHER; note = 2'-O-methyl-adenosine-3'-phosphate
  modified_base 7: mod_base = OTHER; note = 2'-O-methyl-guanosine-3'-phosphate
  modified_base 8: mod_base = OTHER; note = 2'-O-methyl-cytidine-3'-phosphate
  modified_base 9: mod_base = OTHER; note = 2'-fluoro-adenosine-3'-phosphate
  modified_base 10: mod_base = OTHER; note = 2'-O-methyl-adenosine-3'-phosphate
  modified_base 11: mod_base = OTHER; note = 2'-O-methyl-adenosine-3'-phosphate
  modified_base 12: mod_base = OTHER; note = 2'-fluoro-guanosine-3'-phosphate
  modified_base 13: mod_base = OTHER; note = 2'-O-methyl-cytidine-3'-phosphate
  modified_base 14: mod_base = OTHER; note = 2'-fluoro-uridine-3'-phosphate
  modified_base 15: mod_base = OTHER; note = 2'-O-methyl-guanosine-3'-phosphate
  modified_base 16: mod_base = OTHER; note = 2'-O-methyl-adenosine-3'-phosphate
  modified_base 17: mod_base = OTHER; note = 2'-O-methyl-uridine-3'-phosphate
  modified_base 18: mod_base = OTHER; note = 2'-O-methyl-guanosine-3'-phosphate
  modified_base 19: mod_base = OTHER; note = 2'-O-methyl-guanosine-3'-thiophosphate-phosphate
  modified_base 20: mod_base = OTHER; note = 2'-O-methyl-uridine-3'-thiophosphate-phosphate
  modified_base 21: mod_base = OTHER; note = 2'-O-methyl-uridine-3'-phosphate
acagtagcaaagctgatggtt

SEQ ID NO: 1817 - RNA, 19 nt, synthetic construct
  source 1..19: mol_type = other RNA
catgtgattacatcatctt

SEQ ID NO: 1818 - RNA, 21 nt, synthetic construct
  source 1..21: mol_type = other RNA
  modified_base 6: mod_base = OTHER; note = 2'-hypoxanthine-3'-phosphate
aagatnatgtaatcacatgtc

SEQ ID NO: 1819 - RNA, 19 nt, synthetic construct
  source 1..19: mol_type = other RNA
  modified_base 1: mod_base = OTHER; note = 2'-O-methyl-cytidine-3'-thiophosphate-phosphate
  modified_base 2: mod_base = OTHER; note = 2'-O-methyl-adenosine-3'-thiophosphate-phosphate
  modified_base 3: mod_base = OTHER; note = 2'-O-methyl-uridine-3'-phosphate
  modified_base 4: mod_base = OTHER; note = 2'-O-methyl-guanosine-3'-phosphate
  modified_base 5: mod_base = OTHER; note = 2'-fluoro-uridine-3'-phosphate
  modified_base 6: mod_base = OTHER; note = 2'-fluoro-guanosine-3'-phosphate
  modified_base 7: mod_base = OTHER; note = 2'-fluoro-adenosine-3'-phosphate
  modified_base 8: mod_base = OTHER; note = 2'-O-methyl-uridine-3'-phosphate
  modified_base 9: mod_base = OTHER; note = 2'-O-methyl-uridine-3'-phosphate
  modified_base 10: mod_base = OTHER; note = 2'-O-methyl-adenosine-3'-phosphate
  modified_base 11: mod_base = OTHER; note = 2'-O-methyl-cytidine-3'-phosphate
  modified_base 12: mod_base = OTHER; note = 2'-O-methyl-adenosine-3'-phosphate
  modified_base 13: mod_base = OTHER; note = 2'-O-methyl-uridine-3'-phosphate
  modified_base 14: mod_base = OTHER; note = 2'-O-methyl-cytidine-3'-phosphate
  modified_base 15: mod_base = OTHER; note = 2'-O-methyl-adenosine-3'-phosphate
  modified_base 16: mod_base = OTHER; note = 2'-O-methyl-uridine-3'-phosphate
  modified_base 17: mod_base = OTHER; note = 2'-O-methyl-cytidine-3'-phosphate
  modified_base 18: mod_base = OTHER; note = 2'-O-methyl-uridine-3'-phosphate
  modified_base 19: mod_base = OTHER; note = 2'-O-methyl-uridine-3'-phosphate
catgtgattacatcatctt

SEQ ID NO: 1820 - RNA, 21 nt, synthetic construct
  source 1..21: mol_type = other RNA
  modified_base 1: mod_base = OTHER; note = 2'-O-methyl-adenosine-3'-thiophosphate-phosphate
  modified_base 2: mod_base = OTHER; note = 2'-fluoro-adenosine-3'-thiophosphate-phosphate
  modified_base 3: mod_base = OTHER; note = 2'-O-methyl-guanosine-3'-phosphate
  modified_base 4: mod_base = OTHER; note = 2'-O-methyl-adenosine-3'-phosphate
  modified_base 5: mod_base = OTHER; note = 2'-O-methyl-uridine-3'-phosphate
  modified_base 6: mod_base = OTHER; note = 2'-O-methyl-hypoxanthine-3'-phosphate
  modified_base 7: mod_base = OTHER; note = 2'-O-methyl-adenosine-3'-phosphate
  modified_base 8: mod_base = OTHER; note = 2'-O-methyl-uridine-3'-phosphate
  modified_base 9: mod_base = OTHER; note = 2'-O-methyl-guanosine-3'-phosphate
  modified_base 10: mod_base = OTHER; note = 2'-O-methyl-uridine-3'-phosphate
  modified_base 11: mod_base = OTHER; note = 2'-fluoro-adenosine-3'-phosphate
  modified_base 12: mod_base = OTHER; note = 2'-O-methyl-adenosine-3'-phosphate
  modified_base 13: mod_base = OTHER; note = 2'-O-methyl-uridine-3'-phosphate
  modified_base 14: mod_base = OTHER; note = 2'-O-methyl-cytidine-3'-phosphate
  modified_base 15: mod_base = OTHER; note = 2'-O-methyl-adenosine-3'-phosphate
  modified_base 16: mod_base = OTHER; note = 2'-O-methyl-cytidine-3'-phosphate
  modified_base 17: mod_base = OTHER; note = 2'-O-methyl-adenosine-3'-phosphate
  modified_base 18: mod_base = OTHER; note = 2'-O-methyl-uridine-3'-phosphate
  modified_base 19: mod_base = OTHER; note = 2'-O-methyl-guanosine-3'-thiophosphate-phosphate
  modified_base 20: mod_base = OTHER; note = 2'-O-methyl-uridine-3'-thiophosphate-phosphate
  modified_base 21: mod_base = OTHER; note = 2'-O-methyl-cytidine-3'-phosphate
aagatnatgtaatcacatgtc

SEQ ID NO: 1821 - RNA, 19 nt, synthetic construct
  source 1..19: mol_type = other RNA
  modified_base 1: mod_base = OTHER; note = 2'-O-methyl-cytidine-3'-thiophosphate-phosphate
  modified_base 2: mod_base = OTHER; note = 2'-O-methyl-adenosine-3'-thiophosphate-phosphate
  modified_base 3: mod_base = OTHER; note = 2'-O-methyl-uridine-3'-phosphate
  modified_base 4: mod_base = OTHER; note = 2'-O-methyl-guanosine-3'-phosphate
  modified_base 5: mod_base = OTHER; note = 2'-fluoro-uridine-3'-phosphate
  modified_base 6: mod_base = OTHER; note = 2'-fluoro-guanosine-3'-phosphate
  modified_base 7: mod_base = OTHER; note = 2'-fluoro-adenosine-3'-phosphate
  modified_base 8: mod_base = OTHER; note = 2'-O-methyl-uridine-3'-phosphate
  modified_base 9: mod_base = OTHER; note = 2'-O-methyl-uridine-3'-phosphate
  modified_base 10: mod_base = OTHER; note = 2'-O-methyl-adenosine-3'-phosphate
  modified_base 11: mod_base = OTHER; note = 2'-O-methyl-cytidine-3'-phosphate
  modified_base 12: mod_base = OTHER; note = 2'-O-methyl-adenosine-3'-phosphate
  modified_base 13: mod_base = OTHER; note = 2'-O-methyl-uridine-3'-phosphate
  modified_base 14: mod_base = OTHER; note = 2'-O-methyl-cytidine-3'-phosphate
  modified_base 15: mod_base = OTHER; note = 2'-O-methyl-adenosine-3'-phosphate
  modified_base 16: mod_base = OTHER; note = 2'-O-methyl-uridine-3'-phosphate
  modified_base 17: mod_base = OTHER; note = 2'-O-methyl-cytidine-3'-phosphate
  modified_base 18: mod_base = OTHER; note = 2'-O-methyl-uridine-3'-phosphate
  modified_base 19: mod_base = OTHER; note = 2'-O-methyl-uridine-3'-phosphate
catgtgattacatcatctt

SEQ ID NO: 1822 - RNA, 21 nt, synthetic construct
  source 1..21: mol_type = other RNA
  modified_base 1: mod_base = OTHER; note = 2'-O-methyl-adenosine-3'-thiophosphate-phosphate
  modified_base 2: mod_base = OTHER; note = 2'-fluoro-adenosine-3'-thiophosphate-phosphate
  modified_base 3: mod_base = OTHER; note = 2'-O-methyl-guanosine-3'-phosphate
  modified_base 4: mod_base = OTHER; note = 2'-O-methyl-adenosine-3'-phosphate
  modified_base 5: mod_base = OTHER; note = 2'-fluoro-uridine-3'-phosphate
  modified_base 6: mod_base = OTHER; note = 2'-O-methyl-hypoxanthine-3'-phosphate
  modified_base 7: mod_base = OTHER; note = 2'-O-methyl-adenosine-3'-phosphate
  modified_base 8: mod_base = OTHER; note = 2'-O-methyl-uridine-3'-phosphate
  modified_base 9: mod_base = OTHER; note = 2'-O-methyl-guanosine-3'-phosphate
  modified_base 10: mod_base = OTHER; note = 2'-O-methyl-uridine-3'-phosphate
  modified_base 11: mod_base = OTHER; note = 2'-fluoro-adenosine-3'-phosphate
  modified_base 12: mod_base = OTHER; note = 2'-O-methyl-adenosine-3'-phosphate
  modified_base 13: mod_base = OTHER; note = 2'-O-methyl-uridine-3'-phosphate
  modified_base 14: mod_base = OTHER; note = 2'-O-methyl-cytidine-3'-phosphate
  modified_base 15: mod_base = OTHER; note = 2'-O-methyl-adenosine-3'-phosphate
  modified_base 16: mod_base = OTHER; note = 2'-O-methyl-cytidine-3'-phosphate
  modified_base 17: mod_base = OTHER; note = 2'-O-methyl-adenosine-3'-phosphate
  modified_base 18: mod_base = OTHER; note = 2'-O-methyl-uridine-3'-phosphate
  modified_base 19: mod_base = OTHER; note = 2'-O-methyl-guanosine-3'-thiophosphate-phosphate
  modified_base 20: mod_base = OTHER; note = 2'-O-methyl-uridine-3'-thiophosphate-phosphate
  modified_base 21: mod_base = OTHER; note = 2'-O-methyl-cytidine-3'-phosphate
aagatnatgtaatcacatgtc

SEQ ID NO: 1823 - RNA, 19 nt, synthetic construct
  source 1..19: mol_type = other RNA
  modified_base 1: mod_base = OTHER; note = 2'-O-methyl-cytidine-3'-thiophosphate-phosphate
  modified_base 2: mod_base = OTHER; note = 2'-O-methyl-adenosine-3'-thiophosphate-phosphate
  modified_base 3: mod_base = OTHER; note = 2'-O-methyl-uridine-3'-phosphate
  modified_base 4: mod_base = OTHER; note = 2'-O-methyl-guanosine-3'-phosphate
  modified_base 5: mod_base = OTHER; note = 2'-fluoro-uridine-3'-phosphate
  modified_base 6: mod_base = OTHER; note = 2'-fluoro-guanosine-3'-phosphate
  modified_base 7: mod_base = OTHER; note = 2'-fluoro-adenosine-3'-phosphate
  modified_base 8: mod_base = OTHER; note = 2'-O-methyl-uridine-3'-phosphate
  modified_base 9: mod_base = OTHER; note = 2'-O-methyl-uridine-3'-phosphate
  modified_base 10: mod_base = OTHER; note = 2'-O-methyl-adenosine-3'-phosphate
  modified_base 11: mod_base = OTHER; note = 2'-O-methyl-cytidine-3'-phosphate
  modified_base 12: mod_base = OTHER; note = 2'-O-methyl-adenosine-3'-phosphate
  modified_base 13: mod_base = OTHER; note = 2'-O-methyl-uridine-3'-phosphate
  modified_base 14: mod_base = OTHER; note = 2'-O-methyl-cytidine-3'-phosphate
  modified_base 15: mod_base = OTHER; note = 2'-O-methyl-adenosine-3'-phosphate
  modified_base 16: mod_base = OTHER; note = 2'-O-methyl-uridine-3'-phosphate
  modified_base 17: mod_base = OTHER; note = 2'-O-methyl-cytidine-3'-phosphate
  modified_base 18: mod_base = OTHER; note = 2'-O-methyl-uridine-3'-phosphate
  modified_base 19: mod_base = OTHER; note = 2'-O-methyl-uridine-3'-phosphate
catgtgattacatcatctt

SEQ ID NO: 1824 - RNA, 21 nt, synthetic construct
  source 1..21: mol_type = other RNA
  modified_base 1: mod_base = OTHER; note = 2'-O-methyl-adenosine-3'-thiophosphate-phosphate
  modified_base 2: mod_base = OTHER; note = 2'-fluoro-adenosine-3'-thiophosphate-phosphate
  modified_base 3: mod_base = OTHER; note = 2'-O-methyl-guanosine-3'-phosphate
  modified_base 4: mod_base = OTHER; note = 2'-O-methyl-adenosine-3'-phosphate
  modified_base 5: mod_base = OTHER; note = 2'-fluoro-uridine-3'-phosphate
  modified_base 6: mod_base = OTHER; note = 2'-O-methyl-hypoxanthine-3'-phosphate
  modified_base 7: mod_base = OTHER; note = 2'-fluoro-adenosine-3'-phosphate
  modified_base 8: mod_base = OTHER; note = 2'-O-methyl-uridine-3'-phosphate
  modified_base 9: mod_base = OTHER; note = 2'-O-methyl-guanosine-3'-phosphate
  modified_base 10: mod_base = OTHER; note = 2'-O-methyl-uridine-3'-phosphate
  modified_base 11: mod_base = OTHER; note = 2'-fluoro-adenosine-3'-phosphate
  modified_base 12: mod_base = OTHER; note = 2'-O-methyl-adenosine-3'-phosphate
  modified_base 13: mod_base = OTHER; note = 2'-O-methyl-uridine-3'-phosphate
  modified_base 14: mod_base = OTHER; note = 2'-O-methyl-cytidine-3'-phosphate
  modified_base 15: mod_base = OTHER; note = 2'-O-methyl-adenosine-3'-phosphate
  modified_base 16: mod_base = OTHER; note = 2'-O-methyl-cytidine-3'-phosphate
  modified_base 17: mod_base = OTHER; note = 2'-O-methyl-adenosine-3'-phosphate
  modified_base 18: mod_base = OTHER; note = 2'-O-methyl-uridine-3'-phosphate
  modified_base 19: mod_base = OTHER; note = 2'-O-methyl-guanosine-3'-thiophosphate-phosphate
  modified_base 20: mod_base = OTHER; note = 2'-O-methyl-uridine-3'-thiophosphate-phosphate
  modified_base 21: mod_base = OTHER; note = 2'-O-methyl-cytidine-3'-phosphate
aagatnatgtaatcacatgtc

SEQ ID NO: 1825 - RNA, 19 nt, synthetic construct
  source 1..19: mol_type = other RNA
  modified_base 1: mod_base = OTHER; note = 2'-O-methyl-cytidine-3'-thiophosphate-phosphate
  modified_base 2: mod_base = OTHER; note = 2'-O-methyl-adenosine-3'-thiophosphate-phosphate
  modified_base 3: mod_base = OTHER; note = 2'-O-methyl-uridine-3'-phosphate
  modified_base 4: mod_base = OTHER; note = 2'-O-methyl-guanosine-3'-phosphate
  modified_base 5: mod_base = OTHER; note = 2'-fluoro-uridine-3'-phosphate
  modified_base 6: mod_base = OTHER; note = 2'-fluoro-guanosine-3'-phosphate
  modified_base 7: mod_base = OTHER; note = 2'-fluoro-adenosine-3'-phosphate
  modified_base 8: mod_base = OTHER; note = 2'-O-methyl-uridine-3'-phosphate
  modified_base 9: mod_base = OTHER; note = 2'-O-methyl-uridine-3'-phosphate
  modified_base 10: mod_base = OTHER; note = 2'-O-methyl-adenosine-3'-phosphate
  modified_base 11: mod_base = OTHER; note = 2'-O-methyl-cytidine-3'-phosphate
  modified_base 12: mod_base = OTHER; note = 2'-O-methyl-adenosine-3'-phosphate
  modified_base 13: mod_base = OTHER; note = 2'-O-methyl-uridine-3'-phosphate
  modified_base 14: mod_base = OTHER; note = 2'-O-methyl-cytidine-3'-phosphate
  modified_base 15: mod_base = OTHER; note = 2'-O-methyl-adenosine-3'-phosphate
  modified_base 16: mod_base = OTHER; note = 2'-O-methyl-uridine-3'-phosphate
  modified_base 17: mod_base = OTHER; note = 2'-O-methyl-cytidine-3'-phosphate
  modified_base 18: mod_base = OTHER; note = 2'-O-methyl-uridine-3'-phosphate
  modified_base 19: mod_base = OTHER; note = 2'-O-methyl-uridine-3'-phosphate
catgtgattacatcatctt

SEQ ID NO: 1826 - RNA, 21 nt, synthetic construct
  source 1..21: mol_type = other RNA
  modified_base 1: mod_base = OTHER; note = 2'-O-methyl-adenosine-3'-thiophosphate-phosphate
  modified_base 2: mod_base = OTHER; note = 2'-deoxy-adenosine-3'-thiophosphate-phosphate
  modified_base 3: mod_base = OTHER; note = 2'-O-methyl-guanosine-3'-phosphate
  modified_base 4: mod_base = OTHER; note = 2'-O-methyl-adenosine-3'-phosphate
  modified_base 5: mod_base = OTHER; note = 2'-deoxy-uridine-3'-phosphate
  modified_base 6: mod_base = OTHER; note = 2'-O-methyl-hypoxanthine-3'-phosphate
  modified_base 7: mod_base = OTHER; note = 2'-deoxy-adenosine-3'-phosphate
  modified_base 8: mod_base = OTHER; note = 2'-O-methyl-uridine-3'-phosphate
  modified_base 9: mod_base = OTHER; note = 2'-O-methyl-guanosine-3'-phosphate
  modified_base 10: mod_base = OTHER; note = 2'-O-methyl-uridine-3'-phosphate
  modified_base 11: mod_base = OTHER; note = 2'-fluoro-adenosine-3'-phosphate
  modified_base 12: mod_base = OTHER; note = 2'-deoxy-adenosine-3'-phosphate
  modified_base 13: mod_base = OTHER; note = 2'-O-methyl-uridine-3'-phosphate
  modified_base 14: mod_base = OTHER; note = 2'-O-methyl-cytidine-3'-phosphate
  modified_base 15: mod_base = OTHER; note = 2'-O-methyl-adenosine-3'-phosphate
  modified_base 16: mod_base = OTHER; note = 2'-O-methyl-cytidine-3'-phosphate
  modified_base 17: mod_base = OTHER; note = 2'-O-methyl-adenosine-3'-phosphate
  modified_base 18: mod_base = OTHER; note = 2'-O-methyl-uridine-3'-phosphate
  modified_base 19: mod_base = OTHER; note = 2'-O-methyl-guanosine-3'-thiophosphate-phosphate
  modified_base 20: mod_base = OTHER; note = 2'-O-methyl-uridine-3'-thiophosphate-phosphate
  modified_base 21: mod_base = OTHER; note = 2'-O-methyl-cytidine-3'-phosphate
aagatnatgtaatcacatgtc

SEQ ID NO: 1827 - RNA, 19 nt, synthetic construct
  source 1..19: mol_type = other RNA
  modified_base 1: mod_base = OTHER; note = 2'-O-methyl-cytidine-3'-thiophosphate-phosphate
  modified_base 2: mod_base = OTHER; note = 2'-O-methyl-adenosine-3'-thiophosphate-phosphate
  modified_base 3: mod_base = OTHER; note = 2'-O-methyl-uridine-3'-phosphate
  modified_base 4: mod_base = OTHER; note = 2'-O-methyl-guanosine-3'-phosphate
  modified_base 5: mod_base = OTHER; note = 2'-O-methyl-uridine-3'-phosphate
  modified_base 6: mod_base = OTHER; note = 2'-O-methyl-guanosine-3'-phosphate
  modified_base 7: mod_base = OTHER; note = 2'-O-methyl-adenosine-3'-phosphate
  modified_base 8: mod_base = OTHER; note = 2'-O-methyl-uridine-3'-phosphate
  modified_base 9: mod_base = OTHER; note = 2'-O-methyl-uridine-3'-phosphate
  modified_base 10: mod_base = OTHER; note = 2'-O-methyl-adenosine-3'-phosphate
  modified_base 11: mod_base = OTHER; note = 2'-O-methyl-cytidine-3'-phosphate
  modified_base 12: mod_base = OTHER; note = 2'-O-methyl-adenosine-3'-phosphate
  modified_base 13: mod_base = OTHER; note = 2'-O-methyl-uridine-3'-phosphate
  modified_base 14: mod_base = OTHER; note = 2'-O-methyl-cytidine-3'-phosphate
  modified_base 15: mod_base = OTHER; note = 2'-O-methyl-adenosine-3'-phosphate
  modified_base 16: mod_base = OTHER; note = 2'-O-methyl-uridine-3'-phosphate
  modified_base 17: mod_base = OTHER; note = 2'-O-methyl-cytidine-3'-phosphate
  modified_base 18: mod_base = OTHER; note = 2'-O-methyl-uridine-3'-phosphate
  modified_base 19: mod_base = OTHER; note = 2'-O-methyl-uridine-3'-phosphate
catgtgattacatcatctt

SEQ ID NO: 1828 - RNA, 21 nt, synthetic construct
  source 1..21: mol_type = other RNA
  modified_base 1: mod_base = OTHER; note = 2'-O-methyl-adenosine-3'-thiophosphate-phosphate
  modified_base 2: mod_base = OTHER; note = 2'-fluoro-adenosine-3'-thiophosphate-phosphate
  modified_base 3: mod_base = OTHER; note = 2'-O-methyl-guanosine-3'-phosphate
  modified_base 4: mod_base = OTHER; note = 2'-O-methyl-adenosine-3'-phosphate
  modified_base 5: mod_base = OTHER; note = 2'-O-methyl-uridine-3'-phosphate
  modified_base 6: mod_base = OTHER; note = 2'-O-methyl-hypoxanthine-3'-phosphate
  modified_base 7: mod_base = OTHER; note = 2'-O-methyl-adenosine-3'-phosphate
  modified_base 8: mod_base = OTHER; note = 2'-O-methyl-uridine-3'-phosphate
  modified_base 9: mod_base = OTHER; note = 2'-O-methyl-guanosine-3'-phosphate
  modified_base 10: mod_base = OTHER; note = 2'-O-methyl-uridine-3'-phosphate
  modified_base 11: mod_base = OTHER; note = 2'-fluoro-adenosine-3'-phosphate
  modified_base 12: mod_base = OTHER; note = 2'-O-methyl-adenosine-3'-phosphate
  modified_base 13: mod_base = OTHER; note = 2'-O-methyl-uridine-3'-phosphate
  modified_base 14: mod_base = OTHER; note = 2'-O-methyl-cytidine-3'-phosphate
  modified_base 15: mod_base = OTHER; note = 2'-O-methyl-adenosine-3'-phosphate
  modified_base 16: mod_base = OTHER; note = 2'-O-methyl-cytidine-3'-phosphate
  modified_base 17: mod_base = OTHER; note = 2'-O-methyl-adenosine-3'-phosphate
  modified_base 18: mod_base = OTHER; note = 2'-O-methyl-uridine-3'-phosphate
  modified_base 19: mod_base = OTHER; note = 2'-O-methyl-guanosine-3'-thiophosphate-phosphate
  modified_base 20: mod_base = OTHER; note = 2'-O-methyl-uridine-3'-thiophosphate-phosphate
  modified_base 21: mod_base = OTHER; note = 2'-O-methyl-cytidine-3'-phosphate
aagatnatgtaatcacatgtc

SEQ ID NO: 1829 - RNA, 19 nt, synthetic construct
  source 1..19: mol_type = other RNA
  modified_base 1: mod_base = OTHER; note = 2'-O-methyl-cytidine-3'-thiophosphate-phosphate
  modified_base 2: mod_base = OTHER; note = 2'-O-methyl-adenosine-3'-thiophosphate-phosphate
  modified_base 3: mod_base = OTHER; note = 2'-O-methyl-uridine-3'-phosphate
  modified_base 4: mod_base = OTHER; note = 2'-O-methyl-guanosine-3'-phosphate
  modified_base 5: mod_base = OTHER; note = 2'-fluoro-uridine-3'-phosphate
  modified_base 6: mod_base = OTHER; note = 2'-fluoro-guanosine-3'-phosphate
  modified_base 7: mod_base = OTHER; note = 2'-fluoro-adenosine-3'-phosphate
  modified_base 8: mod_base = OTHER; note = 2'-O-methyl-uridine-3'-phosphate
  modified_base 9: mod_base = OTHER; note = 2'-O-methyl-uridine-3'-phosphate
  modified_base 10: mod_base = OTHER; note = 2'-O-methyl-adenosine-3'-phosphate
  modified_base 11: mod_base = OTHER; note = 2'-O-methyl-cytidine-3'-phosphate
  modified_base 12: mod_base = OTHER; note = 2'-O-methyl-adenosine-3'-phosphate
  modified_base 13: mod_base = OTHER; note = 2'-O-methyl-uridine-3'-phosphate
  modified_base 14: mod_base = OTHER; note = 2'-O-methyl-cytidine-3'-phosphate
  modified_base 15: mod_base = OTHER; note = 2'-O-methyl-adenosine-3'-phosphate
  modified_base 16: mod_base = OTHER; note = 2'-O-methyl-uridine-3'-phosphate
  modified_base 17: mod_base = OTHER; note = 2'-O-methyl-cytidine-3'-phosphate
  modified_base 18: mod_base = OTHER; note = 2'-O-methyl-uridine-3'-phosphate
  modified_base 19: mod_base = OTHER; note = 2'-O-methyl-uridine-3'-phosphate
catgtgattacatcatctt

SEQ ID NO: 1830 - RNA, 21 nt, synthetic construct
  source 1..21: mol_type = other RNA
  modified_base 1: mod_base = OTHER; note = 2'-O-methyl-adenosine-3'-thiophosphate-phosphate
  modified_base 2: mod_base = OTHER; note = 2'-fluoro-adenosine-3'-thiophosphate-phosphate
  modified_base 3: mod_base = OTHER; note = 2'-O-methyl-guanosine-3'-phosphate
  modified_base 4: mod_base = OTHER; note = 2'-O-methyl-adenosine-3'-phosphate
  modified_base 5: mod_base = OTHER; note = 2'-O-methyl-uridine-3'-phosphate
  modified_base 6: mod_base = OTHER; note = 2'-O-methyl-guanosine-3'-phosphate
  modified_base 7: mod_base = OTHER; note = 2'-O-methyl-adenosine-3'-phosphate
  modified_base 8: mod_base = OTHER; note = 2'-O-methyl-uridine-3'-phosphate
  modified_base 9: mod_base = OTHER; note = 2'-O-methyl-guanosine-3'-phosphate
  modified_base 10: mod_base = OTHER; note = 2'-O-methyl-uridine-3'-phosphate
  modified_base 11: mod_base = OTHER; note = 2'-fluoro-adenosine-3'-phosphate
  modified_base 12: mod_base = OTHER; note = 2'-O-methyl-adenosine-3'-phosphate
  modified_base 13: mod_base = OTHER; note = 2'-O-methyl-uridine-3'-phosphate
  modified_base 14: mod_base = OTHER; note = 2'-O-methyl-cytidine-3'-phosphate
  modified_base 15: mod_base = OTHER; note = 2'-O-methyl-adenosine-3'-phosphate
  modified_base 16: mod_base = OTHER; note = 2'-O-methyl-cytidine-3'-phosphate
  modified_base 17: mod_base = OTHER; note = 2'-O-methyl-adenosine-3'-phosphate
  modified_base 18: mod_base = OTHER; note = 2'-O-methyl-uridine-3'-phosphate
  modified_base 19: mod_base = OTHER; note = 2'-O-methyl-guanosine-3'-thiophosphate-phosphate
  modified_base 20: mod_base = OTHER; note = 2'-O-methyl-uridine-3'-thiophosphate-phosphate
  modified_base 21: mod_base = OTHER; note = 2'-O-methyl-cytidine-3'-phosphate
aagatgatgtaatcacatgtc

SEQ ID NO: 1831 - RNA, 19 nt, synthetic construct
  source 1..19: mol_type = other RNA
  modified_base 1: mod_base = OTHER; note = 2'-O-methyl-cytidine-3'-thiophosphate-phosphate
  modified_base 2: mod_base = OTHER; note = 2'-O-methyl-adenosine-3'-thiophosphate-phosphate
  modified_base 3: mod_base = OTHER; note = 2'-O-methyl-uridine-3'-phosphate
  modified_base 4: mod_base = OTHER; note = 2'-O-methyl-guanosine-3'-phosphate
  modified_base 5: mod_base = OTHER; note = 2'-fluoro-uridine-3'-phosphate
  modified_base 6: mod_base = OTHER; note = 2'-fluoro-guanosine-3'-phosphate
  modified_base 7: mod_base = OTHER; note = 2'-fluoro-adenosine-3'-phosphate
  modified_base 8: mod_base = OTHER; note = 2'-O-methyl-uridine-3'-phosphate
  modified_base 9: mod_base = OTHER; note = 2'-O-methyl-uridine-3'-phosphate
  modified_base 10: mod_base = OTHER; note = 2'-O-methyl-adenosine-3'-phosphate
  modified_base 11: mod_base = OTHER; note = 2'-O-methyl-cytidine-3'-phosphate
  modified_base 12: mod_base = OTHER; note = 2'-O-methyl-adenosine-3'-phosphate
  modified_base 13: mod_base = OTHER; note = 2'-O-methyl-uridine-3'-phosphate
  modified_base 14: mod_base = OTHER; note = 2'-O-methyl-cytidine-3'-phosphate
  modified_base 15: mod_base = OTHER; note = 2'-O-methyl-adenosine-3'-phosphate
  modified_base 16: mod_base = OTHER; note = 2'-O-methyl-uridine-3'-phosphate
  modified_base 17: mod_base = OTHER; note = 2'-O-methyl-cytidine-3'-thiophosphate-phosphate
  modified_base 18: mod_base = OTHER; note = 2'-O-methyl-uridine-3'-thiophosphate-phosphate
  modified_base 19: mod_base = OTHER; note = 2'-O-methyl-uridine-3'-phosphate
catgtgattacatcatctt

SEQ ID NO: 1832 - RNA, 21 nt, synthetic construct
  source 1..21: mol_type = other RNA
  modified_base 1: mod_base = OTHER; note = 2'-O-methyl-adenosine-3'-thiophosphate-phosphate
  modified_base 2: mod_base = OTHER; note = 2'-fluoro-adenosine-3'-thiophosphate-phosphate
  modified_base 3: mod_base = OTHER; note = 2'-O-methyl-guanosine-3'-phosphate
  modified_base 4: mod_base = OTHER; note = 2'-O-methyl-adenosine-3'-phosphate
  modified_base 5: mod_base = OTHER; note = 2'-O-methyl-uridine-3'-phosphate
  modified_base 6: mod_base = OTHER; note = 2'-O-methyl-hypoxanthine-3'-phosphate
  modified_base 7: mod_base = OTHER; note = 2'-O-methyl-adenosine-3'-phosphate
  modified_base 8: mod_base = OTHER; note = 2'-O-methyl-uridine-3'-phosphate
  modified_base 9: mod_base = OTHER; note = 2'-O-methyl-guanosine-3'-phosphate
  modified_base 10: mod_base = OTHER; note = 2'-O-methyl-uridine-3'-phosphate
  modified_base 11: mod_base = OTHER; note = 2'-fluoro-adenosine-3'-phosphate
  modified_base 12: mod_base = OTHER; note = 2'-O-methyl-adenosine-3'-phosphate
  modified_base 13: mod_base = OTHER; note = 2'-O-methyl-uridine-3'-phosphate
  modified_base 14: mod_base = OTHER; note = 2'-O-methyl-cytidine-3'-phosphate
  modified_base 15: mod_base = OTHER; note = 2'-O-methyl-adenosine-3'-phosphate
  modified_base 16: mod_base = OTHER; note = 2'-O-methyl-cytidine-3'-phosphate
  modified_base 17: mod_base = OTHER; note = 2'-O-methyl-adenosine-3'-phosphate
  modified_base 18: mod_base = OTHER; note = 2'-O-methyl-uridine-3'-phosphate
  modified_base 19: mod_base = OTHER; note = 2'-O-methyl-guanosine-3'-thiophosphate-phosphate
  modified_base 20: mod_base = OTHER; note = 2'-O-methyl-uridine-3'-thiophosphate-phosphate
  modified_base 21: mod_base = OTHER; note = 2'-O-methyl-cytidine-3'-phosphate
aagatnatgtaatcacatgtc

SEQ ID NO: 1833 - RNA, 19 nt, synthetic construct
  source 1..19: mol_type = other RNA
  modified_base 1: mod_base = OTHER; note = inverted 2'-O-methyl-cytidine-3'-thiophosphate-phosphate
  modified_base 2: mod_base = OTHER; note = 2'-O-methyl-adenosine-3'-thiophosphate-phosphate
  modified_base 3: mod_base = OTHER; note = 2'-O-methyl-uridine-3'-phosphate
  modified_base 4: mod_base = OTHER; note = 2'-O-methyl-guanosine-3'-phosphate
  modified_base 5: mod_base = OTHER; note = 2'-fluoro-uridine-3'-phosphate
  modified_base 6: mod_base = OTHER; note = 2'-fluoro-guanosine-3'-phosphate
  modified_base 7: mod_base = OTHER; note = 2'-fluoro-adenosine-3'-phosphate
  modified_base 8: mod_base = OTHER; note = 2'-O-methyl-uridine-3'-phosphate
  modified_base 9: mod_base = OTHER; note = 2'-O-methyl-uridine-3'-phosphate
  modified_base 10: mod_base = OTHER; note = 2'-O-methyl-adenosine-3'-phosphate
  modified_base 11: mod_base = OTHER; note = 2'-O-methyl-cytidine-3'-phosphate
  modified_base 12: mod_base = OTHER; note = 2'-O-methyl-adenosine-3'-phosphate
  modified_base 13: mod_base = OTHER; note = 2'-O-methyl-uridine-3'-phosphate
  modified_base 14: mod_base = OTHER; note = 2'-O-methyl-cytidine-3'-phosphate
  modified_base 15: mod_base = OTHER; note = 2'-O-methyl-adenosine-3'-phosphate
  modified_base 16: mod_base = OTHER; note = 2'-O-methyl-uridine-3'-phosphate
  modified_base 17: mod_base = OTHER; note = 2'-O-methyl-cytidine-3'-thiophosphate-phosphate
  modified_base 18: mod_base = OTHER; note = 2'-O-methyl-uridine-3'-thiophosphate-phosphate
  modified_base 19: mod_base = OTHER; note = 2'-O-methyl-uridine-3'-phosphate
catgtgattacatcatctt

SEQ ID NO: 1834 - RNA, 21 nt, synthetic construct
  source 1..21: mol_type = other RNA
  modified_base 1: mod_base = OTHER; note = 2'-O-methyl-adenosine-3'-thiophosphate-phosphate
  modified_base 2: mod_base = OTHER; note = 2'-fluoro-adenosine-3'-thiophosphate-phosphate
  modified_base 3: mod_base = OTHER; note = 2'-O-methyl-guanosine-3'-phosphate
  modified_base 4: mod_base = OTHER; note = 2'-O-methyl-adenosine-3'-phosphate
  modified_base 5: mod_base = OTHER; note = 2'-O-methyl-uridine-3'-phosphate
  modified_base 6: mod_base = OTHER; note = 2'-O-methyl-hypoxanthine-3'-phosphate
  modified_base 7: mod_base = OTHER; note = 2'-O-methyl-adenosine-3'-phosphate
  modified_base 8: mod_base = OTHER; note = 2'-O-methyl-uridine-3'-phosphate
  modified_base 9: mod_base = OTHER; note = 2'-O-methyl-guanosine-3'-phosphate
  modified_base 10: mod_base = OTHER; note = 2'-O-methyl-uridine-3'-phosphate
  modified_base 11: mod_base = OTHER; note = 2'-fluoro-adenosine-3'-phosphate
  modified_base 12: mod_base = OTHER; note = 2'-O-methyl-adenosine-3'-phosphate
  modified_base 13: mod_base = OTHER; note = 2'-O-methyl-uridine-3'-phosphate
  modified_base 14: mod_base = OTHER; note = 2'-O-methyl-cytidine-3'-phosphate
  modified_base 15: mod_base = OTHER; note = 2'-O-methyl-adenosine-3'-phosphate
  modified_base 16: mod_base = OTHER; note = 2'-O-methyl-cytidine-3'-phosphate
  modified_base 17: mod_base = OTHER; note = 2'-O-methyl-adenosine-3'-phosphate
  modified_base 18: mod_base = OTHER; note = 2'-O-methyl-uridine-3'-phosphate
  modified_base 19: mod_base = OTHER; note = 2'-O-methyl-guanosine-3'-thiophosphate-phosphate
  modified_base 20: mod_base = OTHER; note = 2'-O-methyl-uridine-3'-thiophosphate-phosphate
  modified_base 21: mod_base = OTHER; note = 2'-O-methyl-cytidine-3'-phosphate
aagatnatgtaatcacatgtc

SEQ ID NO: 1835 - RNA, 21 nt, synthetic construct
  source 1..21: mol_type = other RNA
  modified_base 1: mod_base = OTHER; note = 2'-O-methyl-guanosine-3'-thiophosphate-phosphate
  modified_base 2: mod_base = OTHER; note = 2'-O-methyl-adenosine-3'-thiophosphate-phosphate
  modified_base 3: mod_base = OTHER; note = 2'-O-methyl-cytidine-3'-phosphate
  modified_base 4: mod_base = OTHER; note = 2'-O-methyl-adenosine-3'-phosphate
  modified_base 5: mod_base = OTHER; note = 2'-O-methyl-uridine-3'-phosphate
  modified_base 6: mod_base = OTHER; note = 2'-O-methyl-guanosine-3'-phosphate
  modified_base 7: mod_base = OTHER; note = 2'-fluoro-uridine-3'-phosphate
  modified_base 8: mod_base = OTHER; note = 2'-fluoro-guanosine-3'-phosphate
  modified_base 9: mod_base = OTHER; note = 2'-fluoro-adenosine-3'-phosphate
  modified_base 10: mod_base = OTHER; note = 2'-O-methyl-uridine-3'-phosphate
  modified_base 11: mod_base = OTHER; note = 2'-O-methyl-uridine-3'-phosphate
  modified_base 12: mod_base = OTHER; note = 2'-O-methyl-adenosine-3'-phosphate
  modified_base 13: mod_base = OTHER; note = 2'-O-methyl-cytidine-3'-phosphate
  modified_base 14: mod_base = OTHER; note = 2'-O-methyl-adenosine-3'-phosphate
  modified_base 15: mod_base = OTHER; note = 2'-O-methyl-uridine-3'-phosphate
  modified_base 16: mod_base = OTHER; note = 2'-O-methyl-cytidine-3'-phosphate
  modified_base 17: mod_base = OTHER; note = 2'-O-methyl-adenosine-3'-phosphate
  modified_base 18: mod_base = OTHER; note = 2'-O-methyl-uridine-3'-phosphate
  modified_base 19: mod_base = OTHER; note = 2'-O-methyl-cytidine-3'-thiophosphate-phosphate
  modified_base 20: mod_base = OTHER; note = 2'-O-methyl-uridine-3'-thiophosphate-phosphate
  modified_base 21: mod_base = OTHER; note = 2'-O-methyl-uridine-3'-phosphate
gacatgtgattacatcatctt

SEQ ID NO: 1836 - RNA, 21 nt, synthetic construct
  source 1..21: mol_type = other RNA
  modified_base 1: mod_base = OTHER; note = 2'-O-methyl-adenosine-3'-thiophosphate-phosphate
  modified_base 2: mod_base = OTHER; note = 2'-fluoro-adenosine-3'-thiophosphate-phosphate
  modified_base 3: mod_base = OTHER; note = 2'-O-methyl-guanosine-3'-phosphate
  modified_base 4: mod_base = OTHER; note = 2'-O-methyl-adenosine-3'-phosphate
  modified_base 5: mod_base = OTHER; note = 2'-O-methyl-uridine-3'-phosphate
  modified_base 6: mod_base = OTHER; note = 2'-O-methyl-hypoxanthine-3'-phosphate
  modified_base 7: mod_base = OTHER; note = 2'-O-methyl-adenosine-3'-phosphate
  modified_base 8: mod_base = OTHER; note = 2'-O-methyl-uridine-3'-phosphate
  modified_base 9: mod_base = OTHER; note = 2'-O-methyl-guanosine-3'-phosphate
  modified_base 10: mod_base = OTHER; note = 2'-O-methyl-uridine-3'-phosphate
  modified_base 11: mod_base = OTHER; note = 2'-fluoro-adenosine-3'-phosphate
  modified_base 12: mod_base = OTHER; note = 2'-O-methyl-adenosine-3'-phosphate
  modified_base 13: mod_base = OTHER; note = 2'-O-methyl-uridine-3'-phosphate
  modified_base 14: mod_base = OTHER; note = 2'-O-methyl-cytidine-3'-phosphate
  modified_base 15: mod_base = OTHER; note = 2'-O-methyl-adenosine-3'-phosphate
  modified_base 16: mod_base = OTHER; note = 2'-O-methyl-cytidine-3'-phosphate
  modified_base 17: mod_base = OTHER; note = 2'-O-methyl-adenosine-3'-phosphate
  modified_base 18: mod_base = OTHER; note = 2'-O-methyl-uridine-3'-phosphate
  modified_base 19: mod_base = OTHER; note = 2'-O-methyl-guanosine-3'-thiophosphate-phosphate
  modified_base 20: mod_base = OTHER; note = 2'-O-methyl-uridine-3'-thiophosphate-phosphate
  modified_base 21: mod_base = OTHER; note = 2'-O-methyl-cytidine-3'-phosphate
aagatnatgtaatcacatgtc

SEQ ID NO: 1837 - RNA, 21 nt, synthetic construct
  source 1..21: mol_type = other RNA
  modified_base 1: mod_base = OTHER; note = inverted 2'-O-methyl-guanosine-3'-thiophosphate-phosphate
  modified_base 2: mod_base = OTHER; note = 2'-O-methyl-adenosine-3'-thiophosphate-phosphate
  modified_base 3: mod_base = OTHER; note = 2'-O-methyl-cytidine-3'-phosphate
  modified_base 4: mod_base = OTHER; note = 2'-O-methyl-adenosine-3'-phosphate
  modified_base 5: mod_base = OTHER; note = 2'-O-methyl-uridine-3'-phosphate
  modified_base 6: mod_base = OTHER; note = 2'-O-methyl-guanosine-3'-phosphate
  modified_base 7: mod_base = OTHER; note = 2'-fluoro-uridine-3'-phosphate
  modified_base 8: mod_base = OTHER; note = 2'-fluoro-guanosine-3'-phosphate
  modified_base 9: mod_base = OTHER; note = 2'-fluoro-adenosine-3'-phosphate
  modified_base 10: mod_base = OTHER; note = 2'-O-methyl-uridine-3'-phosphate
  modified_base 11: mod_base = OTHER; note = 2'-O-methyl-uridine-3'-phosphate
  modified_base 12: mod_base = OTHER; note = 2'-O-methyl-adenosine-3'-phosphate
  modified_base 13: mod_base = OTHER; note = 2'-O-methyl-cytidine-3'-phosphate
  modified_base 14: mod_base = OTHER; note = 2'-O-methyl-adenosine-3'-phosphate
  modified_base 15: mod_base = OTHER; note = 2'-O-methyl-uridine-3'-phosphate
  modified_base 16: mod_base = OTHER; note = 2'-O-methyl-cytidine-3'-phosphate
  modified_base 17: mod_base = OTHER; note = 2'-O-methyl-adenosine-3'-phosphate
  modified_base 18: mod_base = OTHER; note = 2'-O-methyl-uridine-3'-phosphate
  modified_base 19: mod_base = OTHER; note = 2'-O-methyl-cytidine-3'-thiophosphate-phosphate
  modified_base 20: mod_base = OTHER; note = 2'-O-methyl-uridine-3'-thiophosphate-phosphate
  modified_base 21: mod_base = OTHER; note = 2'-O-methyl-uridine-3'-phosphate
gacatgtgattacatcatctt

SEQ ID NO: 1838 - RNA, 21 nt, synthetic construct
  source 1..21: mol_type = other RNA
  modified_base 1: mod_base = OTHER; note = 2'-O-methyl-adenosine-3'-thiophosphate-phosphate
  modified_base 2: mod_base = OTHER; note = 2'-fluoro-adenosine-3'-thiophosphate-phosphate
  modified_base 3: mod_base = OTHER; note = 2'-O-methyl-guanosine-3'-phosphate
  modified_base 4: mod_base = OTHER; note = 2'-O-methyl-adenosine-3'-phosphate
  modified_base 5: mod_base = OTHER; note = 2'-O-methyl-uridine-3'-phosphate
  modified_base 6: mod_base = OTHER; note = 2'-O-methyl-hypoxanthine-3'-phosphate
  modified_base 7: mod_base = OTHER; note = 2'-O-methyl-adenosine-3'-phosphate
  modified_base 8: mod_base = OTHER; note = 2'-O-methyl-uridine-3'-phosphate
  modified_base 9: mod_base = OTHER; note = 2'-O-methyl-guanosine-3'-phosphate
  modified_base 10: mod_base = OTHER; note = 2'-O-methyl-uridine-3'-phosphate
  modified_base 11: mod_base = OTHER; note = 2'-fluoro-adenosine-3'-phosphate
  modified_base 12: mod_base = OTHER; note = 2'-O-methyl-adenosine-3'-phosphate
  modified_base 13: mod_base = OTHER; note = 2'-O-methyl-uridine-3'-phosphate
  modified_base 14: mod_base = OTHER; note = 2'-O-methyl-cytidine-3'-phosphate
  modified_base 15: mod_base = OTHER; note = 2'-O-methyl-adenosine-3'-phosphate
  modified_base 16: mod_base = OTHER; note = 2'-O-methyl-cytidine-3'-phosphate
  modified_base 17: mod_base = OTHER; note = 2'-O-methyl-adenosine-3'-phosphate
  modified_base 18: mod_base = OTHER; note = 2'-O-methyl-uridine-3'-phosphate
  modified_base 19: mod_base = OTHER; note = 2'-O-methyl-guanosine-3'-thiophosphate-phosphate
  modified_base 20: mod_base = OTHER; note = 2'-O-methyl-uridine-3'-thiophosphate-phosphate
  modified_base 21: mod_base = OTHER; note = 2'-O-methyl-cytidine-3'-phosphate
aagatnatgtaatcacatgtc

SEQ ID NO: 1839 - RNA, 19 nt, synthetic construct
  source 1..19: mol_type = other RNA
  modified_base 1: mod_base = OTHER; note = 2'-O-methyl-adenosine-3'-thiophosphate-phosphate
  modified_base 2: mod_base = OTHER; note = 2'-O-methyl-guanosine-3'-thiophosphate-phosphate
  modified_base 3: mod_base = OTHER; note = 2'-O-methyl-uridine-3'-phosphate
  modified_base 4: mod_base = OTHER; note = 2'-O-methyl-cytidine-3'-phosphate
  modified_base 5: mod_base = OTHER; note = 2'-O-methyl-adenosine-3'-phosphate
  modified_base 6: mod_base = OTHER; note = 2'-O-methyl-adenosine-3'-phosphate
  modified_base 7: mod_base = OTHER; note = 2'-O-methyl-adenosine-3'-phosphate
  modified_base 8: mod_base = OTHER; note = 2'-O-methyl-guanosine-3'-phosphate
  modified_base 9: mod_base = OTHER; note = 2'-O-methyl-cytidine-3'-phosphate
  modified_base 10: mod_base = OTHER; note = 2'-O-methyl-uridine-3'-phosphate
  modified_base 11: mod_base = OTHER; note = 2'-O-methyl-adenosine-3'-phosphate
  modified_base 12: mod_base = OTHER; note = 2'-O-methyl-uridine-3'-phosphate
  modified_base 13: mod_base = OTHER; note = 2'-O-methyl-uridine-3'-phosphate
  modified_base 14: mod_base = OTHER; note = 2'-O-methyl-uridine-3'-phosphate
  modified_base 15: mod_base = OTHER; note = 2'-O-methyl-uridine-3'-phosphate
  modified_base 16: mod_base = OTHER; note = 2'-O-methyl-cytidine-3'-phosphate
  modified_base 17: mod_base = OTHER; note = 2'-O-methyl-adenosine-3'-thiophosphate-phosphate
  modified_base 18: mod_base = OTHER; note = 2'-O-methyl-uridine-3'-thiophosphate-phosphate
  modified_base 19: mod_base = OTHER; note = 2'-O-methyl-adenosine-3'-phosphate
agtcaaagctattttcata

SEQ ID NO: 1840 - RNA, 21 nt, synthetic construct
  source 1..21: mol_type = other RNA
  modified_base 1: mod_base = OTHER; note = 2'-O-methyl-uridine-3'-thiophosphate-phosphate
  modified_base 2: mod_base = OTHER; note = 2'-fluoro-adenosine-3'-thiophosphate-phosphate
  modified_base 3: mod_base = OTHER; note = 2'-O-methyl-uridine-3'-phosphate
  modified_base 4: mod_base = OTHER; note = 2'-O-methyl-guanosine-3'-phosphate
  modified_base 5: mod_base = OTHER; note = 2'-O-methyl-adenosine-3'-phosphate
  modified_base 6: mod_base = OTHER; note = 2'-fluoro-adenosine-3'-phosphate
  modified_base 7: mod_base = OTHER; note = 2'-O-methyl-adenosine-3'-phosphate
  modified_base 8: mod_base = OTHER; note = 2'-fluoro-adenosine-3'-phosphate
  modified_base 9: mod_base = OTHER; note = 2'-O-methyl-uridine-3'-phosphate
  modified_base 10: mod_base = OTHER; note = 2'-O-methyl-adenosine-3'-phosphate
  modified_base 11: mod_base = OTHER; note = 2'-O-methyl-guanosine-3'-phosphate
  modified_base 12: mod_base = OTHER; note = 2'-O-methyl-cytidine-3'-phosphate
  modified_base 13: mod_base = OTHER; note = 2'-O-methyl-uridine-3'-phosphate
  modified_base 14: mod_base = OTHER; note = 2'-fluoro-uridine-3'-phosphate
  modified_base 15: mod_base = OTHER; note = 2'-O-methyl-uridine-3'-phosphate
  modified_base 16: mod_base = OTHER; note = 2'-O-methyl-guanosine-3'-phosphate
  modified_base 17: mod_base = OTHER; note = 2'-O-methyl-adenosine-3'-phosphate
  modified_base 18: mod_base = OTHER; note = 2'-O-methyl-cytidine-3'-phosphate
  modified_base 19: mod_base = OTHER; note = 2'-O-methyl-uridine-3'-thiophosphate-phosphate
  modified_base 20: mod_base = OTHER; note = 2'-O-methyl-uridine-3'-thiophosphate-phosphate
  modified_base 21: mod_base = OTHER; note = 2'-O-methyl-uridine-3'-phosphate
tatgaaaatagctttgacttt

SEQ ID NO: 1841 - RNA, 19 nt, synthetic construct
  source 1..19: mol_type = other RNA
  modified_base 1: mod_base = OTHER; note = 2'-O-methyl-adenosine-3'-thiophosphate-phosphate
  modified_base 2: mod_base = OTHER; note = 2'-O-methyl-guanosine-3'-thiophosphate-phosphate
  modified_base 3: mod_base = OTHER; note = 2'-O-methyl-uridine-3'-phosphate
  modified_base 4: mod_base = OTHER; note = 2'-O-methyl-cytidine-3'-phosphate
  modified_base 5: mod_base = OTHER; note = 2'-O-methyl-adenosine-3'-phosphate
  modified_base 6: mod_base = OTHER; note = 2'-O-methyl-adenosine-3'-phosphate
  modified_base 7: mod_base = OTHER; note = 2'-O-methyl-adenosine-3'-phosphate
  modified_base 8: mod_base = OTHER; note = 2'-O-methyl-guanosine-3'-phosphate
  modified_base 9: mod_base = OTHER; note = 2'-O-methyl-cytidine-3'-phosphate
  modified_base 10: mod_base = OTHER; note = 2'-O-methyl-uridine-3'-phosphate
  modified_base 11: mod_base = OTHER; note = 2'-O-methyl-adenosine-3'-phosphate
  modified_base 12: mod_base = OTHER; note = 2'-O-methyl-uridine-3'-phosphate
  modified_base 13: mod_base = OTHER; note = 2'-O-methyl-uridine-3'-phosphate
  modified_base 14: mod_base = OTHER; note = 2'-O-methyl-uridine-3'-phosphate
  modified_base 15: mod_base = OTHER; note = 2'-O-methyl-uridine-3'-phosphate
  modified_base 16: mod_base = OTHER; note = 2'-O-methyl-cytidine-3'-phosphate
  modified_base 17: mod_base = OTHER; note = 2'-O-methyl-adenosine-3'-thiophosphate-phosphate
  modified_base 18: mod_base = OTHER; note = 2'-O-methyl-uridine-3'-thiophosphate-phosphate
  modified_base 19: mod_base = OTHER; note = 2'-O-methyl-adenosine-3'-phosphate
agtcaaagctattttcata

SEQ ID NO: 1842 - RNA, 21 nt, synthetic construct
  source 1..21: mol_type = other RNA
  modified_base 1: mod_base = OTHER; note = 2'-O-methyl-uridine-3'-thiophosphate-phosphate
  modified_base 2: mod_base = OTHER; note = 2'-fluoro-adenosine-3'-thiophosphate-phosphate
  modified_base 3: mod_base = OTHER; note = 2'-O-methyl-uridine-3'-phosphate
  modified_base 4: mod_base = OTHER; note = 2'-O-methyl-guanosine-3'-phosphate
  modified_base 5: mod_base = OTHER; note = 2'-fluoro-adenosine-3'-phosphate
  modified_base 6: mod_base = OTHER; note = 2'-fluoro-adenosine-3'-phosphate
  modified_base 7: mod_base = OTHER; note = 2'-O-methyl-adenosine-3'-phosphate
  modified_base 8: mod_base = OTHER; note = 2'-fluoro-adenosine-3'-phosphate
  modified_base 9: mod_base = OTHER; note = 2'-O-methyl-uridine-3'-phosphate
  modified_base 10: mod_base = OTHER; note = 2'-O-methyl-adenosine-3'-phosphate
  modified_base 11: mod_base = OTHER; note = 2'-O-methyl-guanosine-3'-phosphate
  modified_base 12: mod_base = OTHER; note = 2'-O-methyl-cytidine-3'-phosphate
  modified_base 13: mod_base = OTHER; note = 2'-O-methyl-uridine-3'-phosphate
  modified_base 14: mod_base = OTHER; note = 2'-fluoro-uridine-3'-phosphate
  modified_base 15: mod_base = OTHER; note = 2'-O-methyl-uridine-3'-phosphate
  modified_base 16: mod_base = OTHER; note = 2'-O-methyl-guanosine-3'-phosphate
  modified_base 17: mod_base = OTHER; note = 2'-O-methyl-adenosine-3'-phosphate
  modified_base 18: mod_base = OTHER; note = 2'-O-methyl-cytidine-3'-phosphate
  modified_base 19: mod_base = OTHER; note = 2'-O-methyl-uridine-3'-thiophosphate-phosphate
  modified_base 20: mod_base = OTHER; note = 2'-O-methyl-uridine-3'-thiophosphate-phosphate
  modified_base 21: mod_base = OTHER; note = 2'-O-methyl-uridine-3'-phosphate
tatgaaaatagctttgacttt

SEQ ID NO: 1843 - RNA, 19 nt, synthetic construct
  source 1..19: mol_type = other RNA
  modified_base 1: mod_base = OTHER; note = 2'-O-methyl-adenosine-3'-thiophosphate-phosphate
  modified_base 2: mod_base = OTHER; note = 2'-O-methyl-guanosine-3'-thiophosphate-phosphate
  modified_base 3: mod_base = OTHER; note = 2'-O-methyl-uridine-3'-phosphate
  modified_base 4: mod_base = OTHER; note = 2'-O-methyl-cytidine-3'-phosphate
  modified_base 5: mod_base = OTHER; note = 2'-O-methyl-adenosine-3'-phosphate
  modified_base 6: mod_base = OTHER; note = 2'-O-methyl-adenosine-3'-phosphate
  modified_base 7: mod_base = OTHER; note = 2'-O-methyl-adenosine-3'-phosphate
  modified_base 8: mod_base = OTHER; note = 2'-O-methyl-guanosine-3'-phosphate
  modified_base 9: mod_base = OTHER; note = 2'-O-methyl-cytidine-3'-phosphate
  modified_base 10: mod_base = OTHER; note = 2'-O-methyl-uridine-3'-phosphate
  modified_base 11: mod_base = OTHER; note = 2'-O-methyl-adenosine-3'-phosphate
  modified_base 12: mod_base = OTHER; note = 2'-O-methyl-uridine-3'-phosphate
  modified_base 13: mod_base = OTHER; note = 2'-O-methyl-uridine-3'-phosphate
  modified_base 14: mod_base = OTHER; note = 2'-O-methyl-uridine-3'-phosphate
  modified_base 15: mod_base = OTHER; note = 2'-O-methyl-uridine-3'-phosphate
  modified_base 16: mod_base = OTHER; note = 2'-O-methyl-cytidine-3'-phosphate
  modified_base 17: mod_base = OTHER; note = 2'-O-methyl-adenosine-3'-thiophosphate-phosphate
  modified_base 18: mod_base = OTHER; note = 2'-O-methyl-uridine-3'-thiophosphate-phosphate
  modified_base 19: mod_base = OTHER; note = 2'-O-methyl-adenosine-3'-phosphate
agtcaaagctattttcata

SEQ ID NO: 1844 - RNA, 21 nt, synthetic construct
  source 1..21: mol_type = other RNA
  modified_base 1: mod_base = OTHER; note = 2'-O-methyl-uridine-3'-thiophosphate-phosphate
  modified_base 2: mod_base = OTHER; note = 2'-fluoro-adenosine-3'-thiophosphate-phosphate
  modified_base 3: mod_base = OTHER; note = 2'-O-methyl-uridine-3'-phosphate
  modified_base 4: mod_base = OTHER; note = 2'-O-methyl-guanosine-3'-phosphate
  modified_base 5: mod_base = OTHER; note = 2'-O-methyl-adenosine-3'-phosphate
  modified_base 6: mod_base = OTHER; note = 2'-fluoro-adenosine-3'-phosphate
  modified_base 7: mod_base = OTHER; note = 2'-fluoro-adenosine-3'-phosphate
  modified_base 8: mod_base = OTHER; note = 2'-fluoro-adenosine-3'-phosphate
  modified_base 9: mod_base = OTHER; note = 2'-O-methyl-uridine-3'-phosphate
  modified_base 10: mod_base = OTHER; note = 2'-O-methyl-adenosine-3'-phosphate
  modified_base 11: mod_base = OTHER; note = 2'-O-methyl-guanosine-3'-phosphate
  modified_base 12: mod_base = OTHER; note = 2'-O-methyl-cytidine-3'-phosphate
  modified_base 13: mod_base = OTHER; note = 2'-O-methyl-uridine-3'-phosphate
  modified_base 14: mod_base = OTHER; note = 2'-fluoro-uridine-3'-phosphate
  modified_base 15: mod_base = OTHER; note = 2'-O-methyl-uridine-3'-phosphate
  modified_base 16: mod_base = OTHER; note = 2'-O-methyl-guanosine-3'-phosphate
  modified_base 17: mod_base = OTHER; note = 2'-O-methyl-adenosine-3'-phosphate
  modified_base 18: mod_base = OTHER; note = 2'-O-methyl-cytidine-3'-phosphate
  modified_base 19: mod_base = OTHER; note = 2'-O-methyl-uridine-3'-thiophosphate-phosphate
  modified_base 20: mod_base = OTHER; note = 2'-O-methyl-uridine-3'-thiophosphate-phosphate
  modified_base 21: mod_base = OTHER; note = 2'-O-methyl-uridine-3'-phosphate
tatgaaaatagctttgacttt

SEQ ID NO: 1845 - RNA, 19 nt, synthetic construct
  source 1..19: mol_type = other RNA
  modified_base 1: mod_base = OTHER; note = 2'-O-methyl-adenosine-3'-thiophosphate-phosphate
  modified_base 2: mod_base = OTHER; note = 2'-O-methyl-guanosine-3'-thiophosphate-phosphate
  modified_base 3: mod_base = OTHER; note = 2'-O-methyl-uridine-3'-phosphate
  modified_base 4: mod_base = OTHER; note = 2'-O-methyl-cytidine-3'-phosphate
  modified_base 5: mod_base = OTHER; note = 2'-O-methyl-adenosine-3'-phosphate
  modified_base 6: mod_base = OTHER; note = 2'-O-methyl-adenosine-3'-phosphate
  modified_base 7: mod_base = OTHER; note = 2'-O-methyl-adenosine-3'-phosphate
  modified_base 8: mod_base = OTHER; note = 2'-O-methyl-guanosine-3'-phosphate
  modified_base 9: mod_base = OTHER; note = 2'-O-methyl-cytidine-3'-phosphate
  modified_base 10: mod_base = OTHER; note = 2'-O-methyl-uridine-3'-phosphate
  modified_base 11: mod_base = OTHER; note = 2'-O-methyl-adenosine-3'-phosphate
  modified_base 12: mod_base = OTHER; note = 2'-O-methyl-uridine-3'-phosphate
  modified_base 13: mod_base = OTHER; note = 2'-O-methyl-uridine-3'-phosphate
  modified_base 14: mod_base = OTHER; note = 2'-O-methyl-uridine-3'-phosphate
  modified_base 15: mod_base = OTHER; note = 2'-O-methyl-uridine-3'-phosphate
  modified_base 16: mod_base = OTHER; note = 2'-O-methyl-cytidine-3'-phosphate
  modified_base 17: mod_base = OTHER; note = 2'-O-methyl-adenosine-3'-thiophosphate-phosphate
  modified_base 18: mod_base = OTHER; note = 2'-O-methyl-uridine-3'-thiophosphate-phosphate
  modified_base 19: mod_base = OTHER; note = 2'-O-methyl-adenosine-3'-phosphate
agtcaaagctattttcata

SEQ ID NO: 1846 - RNA, 21 nt, synthetic construct
  source 1..21: mol_type = other RNA
  modified_base 1: mod_base = OTHER; note = 2'-O-methyl-uridine-3'-thiophosphate-phosphate
  modified_base 2: mod_base = OTHER; note = 2'-fluoro-adenosine-3'-thiophosphate-phosphate
  modified_base 3: mod_base = OTHER; note = 2'-O-methyl-uridine-3'-phosphate
  modified_base 4: mod_base = OTHER; note = 2'-O-methyl-guanosine-3'-phosphate
  modified_base 5: mod_base = OTHER; note = 2'-fluoro-adenosine-3'-phosphate
  modified_base 6: mod_base = OTHER; note = 2'-fluoro-adenosine-3'-phosphate
  modified_base 7: mod_base = OTHER; note = 2'-fluoro-adenosine-3'-phosphate
  modified_base 8: mod_base = OTHER; note = 2'-fluoro-adenosine-3'-phosphate
  modified_base 9: mod_base = OTHER; note = 2'-O-methyl-uridine-3'-phosphate
  modified_base 10: mod_base = OTHER; note = 2'-O-methyl-adenosine-3'-phosphate
  modified_base 11: mod_base = OTHER; note = 2'-O-methyl-guanosine-3'-phosphate
  modified_base 12: mod_base = OTHER; note = 2'-O-methyl-cytidine-3'-phosphate
  modified_base 13: mod_base = OTHER; note = 2'-O-methyl-uridine-3'-phosphate
  modified_base 14: mod_base = OTHER; note = 2'-fluoro-uridine-3'-phosphate
  modified_base 15: mod_base = OTHER; note = 2'-O-methyl-uridine-3'-phosphate
  modified_base 16: mod_base = OTHER; note = 2'-O-methyl-guanosine-3'-phosphate
  modified_base 17: mod_base = OTHER; note = 2'-O-methyl-adenosine-3'-phosphate
  modified_base 18: mod_base = OTHER; note = 2'-O-methyl-cytidine-3'-phosphate
  modified_base 19: mod_base = OTHER; note = 2'-O-methyl-uridine-3'-thiophosphate-phosphate
  modified_base 20: mod_base = OTHER; note = 2'-O-methyl-uridine-3'-thiophosphate-phosphate
  modified_base 21: mod_base = OTHER; note = 2'-O-methyl-uridine-3'-phosphate
tatgaaaatagctttgacttt

SEQ ID NO: 1847 - RNA, 19 nt, synthetic construct
  source 1..19: mol_type = other RNA
  modified_base 1: mod_base = OTHER; note = 2'-O-methyl-adenosine-3'-thiophosphate-phosphate
  modified_base 2: mod_base = OTHER; note = 2'-O-methyl-guanosine-3'-thiophosphate-phosphate
  modified_base 3: mod_base = OTHER; note = 2'-O-methyl-uridine-3'-phosphate
  modified_base 4: mod_base = OTHER; note = 2'-O-methyl-cytidine-3'-phosphate
  modified_base 5: mod_base = OTHER; note = 2'-O-methyl-adenosine-3'-phosphate
  modified_base 6: mod_base = OTHER; note = 2'-O-methyl-adenosine-3'-phosphate
  modified_base 7: mod_base = OTHER; note = 2'-O-methyl-adenosine-3'-phosphate
  modified_base 8: mod_base = OTHER; note = 2'-O-methyl-guanosine-3'-phosphate
  modified_base 9: mod_base = OTHER; note = 2'-O-methyl-cytidine-3'-phosphate
  modified_base 10: mod_base = OTHER; note = 2'-O-methyl-uridine-3'-phosphate
  modified_base 11: mod_base = OTHER; note = 2'-O-methyl-adenosine-3'-phosphate
  modified_base 12: mod_base = OTHER; note = 2'-O-methyl-uridine-3'-phosphate
  modified_base 13: mod_base = OTHER; note = 2'-O-methyl-uridine-3'-phosphate
  modified_base 14: mod_base = OTHER; note = 2'-O-methyl-uridine-3'-phosphate
  modified_base 15: mod_base = OTHER; note = 2'-O-methyl-uridine-3'-phosphate
  modified_base 16: mod_base = OTHER; note = 2'-O-methyl-cytidine-3'-phosphate
  modified_base 17: mod_base = OTHER; note = 2'-O-methyl-adenosine-3'-thiophosphate-phosphate
  modified_base 18: mod_base = OTHER; note = 2'-O-methyl-uridine-3'-thiophosphate-phosphate
  modified_base 19: mod_base = OTHER; note = 2'-O-methyl-adenosine-3'-phosphate
agtcaaagctattttcata

SEQ ID NO: 1848 - RNA, 21 nt, synthetic construct
  source 1..21: mol_type = other RNA
  modified_base 1: mod_base = OTHER; note = 2'-O-methyl-uridine-3'-thiophosphate-phosphate
  modified_base 2: mod_base = OTHER; note = 2'-deoxy-adenosine-3'-thiophosphate-phosphate
  modified_base 3: mod_base = OTHER; note = 2'-O-methyl-uridine-3'-phosphate
  modified_base 4: mod_base = OTHER; note = 2'-fluoro-guanosine-3'-phosphate
  modified_base 5: mod_base = OTHER; note = 2'-deoxy-adenosine-3'-phosphate
  modified_base 6: mod_base = OTHER; note = 2'-fluoro-adenosine-3'-phosphate
  modified_base 7: mod_base = OTHER; note = 2'-deoxy-adenosine-3'-phosphate
  modified_base 8: mod_base = OTHER; note = 2'-fluoro-adenosine-3'-phosphate
  modified_base 9: mod_base = OTHER; note = 2'-O-methyl-uridine-3'-phosphate
  modified_base 10: mod_base = OTHER; note = 2'-O-methyl-adenosine-3'-phosphate
  modified_base 11: mod_base = OTHER; note = 2'-O-methyl-guanosine-3'-phosphate
  modified_base 12: mod_base = OTHER; note = 2'-deoxy-cytidine-3'-phosphate
  modified_base 13: mod_base = OTHER; note = 2'-O-methyl-uridine-3'-phosphate
  modified_base 14: mod_base = OTHER; note = 2'-fluoro-uridine-3'-phosphate
  modified_base 15: mod_base = OTHER; note = 2'-O-methyl-uridine-3'-phosphate
  modified_base 16: mod_base = OTHER; note = 2'-fluoro-guanosine-3'-phosphate
  modified_base 17: mod_base = OTHER; note = 2'-O-methyl-adenosine-3'-phosphate
  modified_base 18: mod_base = OTHER; note = 2'-fluoro-cytidine-3'-phosphate
  modified_base 19: mod_base = OTHER; note = 2'-O-methyl-uridine-3'-thiophosphate-phosphate
  modified_base 20: mod_base = OTHER; note = 2'-O-methyl-uridine-3'-thiophosphate-phosphate
  modified_base 21: mod_base = OTHER; note = 2'-O-methyl-uridine-3'-phosphate
tatgaaaatagctttgacttt

SEQ ID NO: 1849 - RNA, 19 nt, synthetic construct
  source 1..19: mol_type = other RNA
  modified_base 1: mod_base = OTHER; note = 2'-O-methyl-cytidine-3'-thiophosphate-phosphate
  modified_base 2: mod_base = OTHER; note = 2'-O-methyl-guanosine-3'-thiophosphate-phosphate
  modified_base 3: mod_base = OTHER; note = 2'-O-methyl-uridine-3'-phosphate
  modified_base 4: mod_base = OTHER; note = 2'-O-methyl-cytidine-3'-phosphate
  modified_base 5: mod_base = OTHER; note = 2'-O-methyl-adenosine-3'-phosphate
  modified_base 6: mod_base = OTHER; note = 2'-O-methyl-adenosine-3'-phosphate
  modified_base 7: mod_base = OTHER; note = 2'-O-methyl-adenosine-3'-phosphate
  modified_base 8: mod_base = OTHER; note = 2'-O-methyl-guanosine-3'-phosphate
  modified_base 9: mod_base = OTHER; note = 2'-O-methyl-cytidine-3'-phosphate
  modified_base 10: mod_base = OTHER; note = 2'-O-methyl-uridine-3'-phosphate
  modified_base 11: mod_base = OTHER; note = 2'-O-methyl-adenosine-3'-phosphate
  modified_base 12: mod_base = OTHER; note = 2'-O-methyl-uridine-3'-phosphate
  modified_base 13: mod_base = OTHER; note = 2'-O-methyl-uridine-3'-phosphate
  modified_base 14: mod_base = OTHER; note = 2'-O-methyl-uridine-3'-phosphate
  modified_base 15: mod_base = OTHER; note = 2'-O-methyl-uridine-3'-phosphate
  modified_base 16: mod_base = OTHER; note = 2'-O-methyl-cytidine-3'-phosphate
  modified_base 17: mod_base = OTHER; note = 2'-O-methyl-adenosine-3'-thiophosphate-phosphate
  modified_base 18: mod_base = OTHER; note = 2'-O-methyl-uridine-3'-thiophosphate-phosphate
  modified_base 19: mod_base = OTHER; note = 2'-O-methyl-adenosine-3'-phosphate
cgtcaaagctattttcata

SEQ ID NO: 1850 - RNA, 21 nt, synthetic construct
  source 1..21: mol_type = other RNA
  modified_base 1: mod_base = OTHER; note = 2'-O-methyl-uridine-3'-thiophosphate-phosphate
  modified_base 2: mod_base = OTHER; note = 2'-deoxy-adenosine-3'-thiophosphate-phosphate
  modified_base 3: mod_base = OTHER; note = 2'-O-methyl-uridine-3'-phosphate
  modified_base 4: mod_base = OTHER; note = 2'-fluoro-guanosine-3'-phosphate
  modified_base 5: mod_base = OTHER; note = 2'-deoxy-adenosine-3'-phosphate
  modified_base 6: mod_base = OTHER; note = 2'-fluoro-adenosine-3'-phosphate
  modified_base 7: mod_base = OTHER; note = 2'-deoxy-adenosine-3'-phosphate
  modified_base 8: mod_base = OTHER; note = 2'-fluoro-adenosine-3'-phosphate
  modified_base 9: mod_base = OTHER; note = 2'-O-methyl-uridine-3'-phosphate
  modified_base 10: mod_base = OTHER; note = 2'-O-methyl-adenosine-3'-phosphate
  modified_base 11: mod_base = OTHER; note = 2'-O-methyl-guanosine-3'-phosphate
  modified_base 12: mod_base = OTHER; note = 2'-deoxy-cytidine-3'-phosphate
  modified_base 13: mod_base = OTHER; note = 2'-O-methyl-uridine-3'-phosphate
  modified_base 14: mod_base = OTHER; note = 2'-fluoro-uridine-3'-phosphate
  modified_base 15: mod_base = OTHER; note = 2'-O-methyl-uridine-3'-phosphate
  modified_base 16: mod_base = OTHER; note = 2'-fluoro-guanosine-3'-phosphate
  modified_base 17: mod_base = OTHER; note = 2'-O-methyl-adenosine-3'-phosphate
  modified_base 18: mod_base = OTHER; note = 2'-fluoro-cytidine-3'-phosphate
  modified_base 19: mod_base = OTHER; note = 2'-O-methyl-guanosine-3'-thiophosphate-phosphate
  modified_base 20: mod_base = OTHER; note = 2'-O-methyl-uridine-3'-thiophosphate-phosphate
  modified_base 21: mod_base = OTHER; note = 2'-O-methyl-uridine-3'-phosphate
tatgaaaatagctttgacgtt

SEQ ID NO: 1851 - RNA, 19 nt, synthetic construct
  source 1..19: mol_type = other RNA
  modified_base 1: mod_base = OTHER; note = 2'-O-methyl-adenosine-3'-thiophosphate-phosphate
  modified_base 2: mod_base = OTHER; note = 2'-O-methyl-guanosine-3'-thiophosphate-phosphate
  modified_base 3: mod_base = OTHER; note = 2'-O-methyl-uridine-3'-phosphate
  modified_base 4: mod_base = OTHER; note = 2'-O-methyl-cytidine-3'-phosphate
  modified_base 5: mod_base = OTHER; note = 2'-O-methyl-adenosine-3'-phosphate
  modified_base 6: mod_base = OTHER; note = 2'-O-methyl-adenosine-3'-phosphate
  modified_base 7: mod_base = OTHER; note = 2'-fluoro-adenosine-3'-phosphate
  modified_base 8: mod_base = OTHER; note = 2'-fluoro-guanosine-3'-phosphate
  modified_base 9: mod_base = OTHER; note = 2'-fluoro-cytidine-3'-phosphate
  modified_base 10: mod_base = OTHER; note = 2'-O-methyl-uridine-3'-phosphate
  modified_base 11: mod_base = OTHER; note = 2'-O-methyl-adenosine-3'-phosphate
  modified_base 12: mod_base = OTHER; note = 2'-O-methyl-uridine-3'-phosphate
  modified_base 13: mod_base = OTHER; note = 2'-O-methyl-uridine-3'-phosphate
  modified_base 14: mod_base = OTHER; note = 2'-O-methyl-uridine-3'-phosphate
  modified_base 15: mod_base = OTHER; note = 2'-O-methyl-uridine-3'-phosphate
  modified_base 16: mod_base = OTHER; note = 2'-O-methyl-cytidine-3'-phosphate
  modified_base 17: mod_base = OTHER; note = 2'-O-methyl-adenosine-3'-thiophosphate-phosphate
  modified_base 18: mod_base = OTHER; note = 2'-O-methyl-uridine-3'-thiophosphate-phosphate
  modified_base 19: mod_base = OTHER; note = 2'-O-methyl-adenosine-3'-phosphate
agtcaaagctattttcata

SEQ ID NO: 1852 - RNA, 21 nt, synthetic construct
  source 1..21: mol_type = other RNA
  modified_base 1: mod_base = OTHER; note = 2'-O-methyl-uridine-3'-thiophosphate-phosphate
  modified_base 2: mod_base = OTHER; note = 2'-fluoro-adenosine-3'-thiophosphate-phosphate
  modified_base 3: mod_base = OTHER; note = 2'-O-methyl-uridine-3'-phosphate
  modified_base 4: mod_base = OTHER; note = 2'-O-methyl-guanosine-3'-phosphate
  modified_base 5: mod_base = OTHER; note = 2'-O-methyl-adenosine-3'-phosphate
  modified_base 6: mod_base = OTHER; note = 2'-fluoro-adenosine-3'-phosphate
  modified_base 7: mod_base = OTHER; note = 2'-O-methyl-adenosine-3'-phosphate
  modified_base 8: mod_base = OTHER; note = 2'-fluoro-adenosine-3'-phosphate
  modified_base 9: mod_base = OTHER; note = 2'-O-methyl-uridine-3'-phosphate
  modified_base 10: mod_base = OTHER; note = 2'-O-methyl-adenosine-3'-phosphate
  modified_base 11: mod_base = OTHER; note = 2'-O-methyl-guanosine-3'-phosphate
  modified_base 12: mod_base = OTHER; note = 2'-O-methyl-cytidine-3'-phosphate
  modified_base 13: mod_base = OTHER; note = 2'-O-methyl-uridine-3'-phosphate
  modified_base 14: mod_base = OTHER; note = 2'-fluoro-uridine-3'-phosphate
  modified_base 15: mod_base = OTHER; note = 2'-O-methyl-uridine-3'-phosphate
  modified_base 16: mod_base = OTHER; note = 2'-O-methyl-guanosine-3'-phosphate
  modified_base 17: mod_base = OTHER; note = 2'-O-methyl-adenosine-3'-phosphate
  modified_base 18: mod_base = OTHER; note = 2'-O-methyl-cytidine-3'-phosphate
  modified_base 19: mod_base = OTHER; note = 2'-O-methyl-uridine-3'-thiophosphate-phosphate
  modified_base 20: mod_base = OTHER; note = 2'-O-methyl-uridine-3'-thiophosphate-phosphate
  modified_base 21: mod_base = OTHER; note = 2'-O-methyl-uridine-3'-phosphate
tatgaaaatagctttgacttt

SEQ ID NO: 1853 - RNA, 19 nt, synthetic construct
  source 1..19: mol_type = other RNA
  modified_base 1: mod_base = OTHER; note = 2'-O-methyl-adenosine-3'-thiophosphate-phosphate
  modified_base 2: mod_base = OTHER; note = 2'-O-methyl-guanosine-3'-thiophosphate-phosphate
  modified_base 3: mod_base = OTHER; note = 2'-O-methyl-uridine-3'-phosphate
  modified_base 4: mod_base = OTHER; note = 2'-O-methyl-cytidine-3'-phosphate
  modified_base 5: mod_base = OTHER; note = 2'-O-methyl-adenosine-3'-phosphate
  modified_base 6: mod_base = OTHER; note = 2'-O-methyl-adenosine-3'-phosphate
  modified_base 7: mod_base = OTHER; note = 2'-fluoro-adenosine-3'-phosphate
  modified_base 8: mod_base = OTHER; note = 2'-fluoro-guanosine-3'-phosphate
  modified_base 9: mod_base = OTHER; note = 2'-fluoro-cytidine-3'-phosphate
  modified_base 10: mod_base = OTHER; note = 2'-O-methyl-uridine-3'-phosphate
  modified_base 11: mod_base = OTHER; note = 2'-O-methyl-adenosine-3'-phosphate
  modified_base 12: mod_base = OTHER; note = 2'-O-methyl-uridine-3'-phosphate
  modified_base 13: mod_base = OTHER; note = 2'-O-methyl-uridine-3'-phosphate
  modified_base 14: mod_base = OTHER; note = 2'-O-methyl-uridine-3'-phosphate
  modified_base 15: mod_base = OTHER; note = 2'-O-methyl-uridine-3'-phosphate
  modified_base 16: mod_base = OTHER; note = 2'-O-methyl-cytidine-3'-phosphate
  modified_base 17: mod_base = OTHER; note = 2'-O-methyl-adenosine-3'-phosphate
  modified_base 18: mod_base = OTHER; note = 2'-O-methyl-uridine-3'-phosphate
  modified_base 19: mod_base = OTHER; note = 2'-O-methyl-adenosine-3'-phosphate
agtcaaagctattttcata

SEQ ID NO: 1854 - RNA, 21 nt, synthetic construct
  source 1..21: mol_type = other RNA
  modified_base 1: mod_base = OTHER; note = 2'-O-methyl-uridine-3'-thiophosphate-phosphate
  modified_base 2: mod_base = OTHER; note = 2'-deoxy-adenosine-3'-thiophosphate-phosphate
  modified_base 3: mod_base = OTHER; note = 2'-O-methyl-uridine-3'-phosphate
  modified_base 4: mod_base = OTHER; note = 2'-fluoro-guanosine-3'-phosphate
  modified_base 5: mod_base = OTHER; note = 2'-deoxy-adenosine-3'-phosphate
  modified_base 6: mod_base = OTHER; note = 2'-fluoro-adenosine-3'-phosphate
  modified_base 7: mod_base = OTHER; note = 2'-deoxy-adenosine-3'-phosphate
  modified_base 8: mod_base = OTHER; note = 2'-fluoro-adenosine-3'-phosphate
  modified_base 9: mod_base = OTHER; note = 2'-O-methyl-uridine-3'-phosphate
  modified_base 10: mod_base = OTHER; note = 2'-O-methyl-adenosine-3'-phosphate
  modified_base 11: mod_base = OTHER; note = 2'-O-methyl-guanosine-3'-phosphate
  modified_base 12: mod_base = OTHER; note = 2'-deoxy-cytidine-3'-phosphate
  modified_base 13: mod_base = OTHER; note = 2'-O-methyl-uridine-3'-phosphate
  modified_base 14: mod_base = OTHER; note = 2'-fluoro-uridine-3'-phosphate
  modified_base 15: mod_base = OTHER; note = 2'-O-methyl-uridine-3'-phosphate
  modified_base 16: mod_base = OTHER; note = 2'-fluoro-guanosine-3'-phosphate
  modified_base 17: mod_base = OTHER; note = 2'-O-methyl-adenosine-3'-phosphate
  modified_base 18: mod_base = OTHER; note = 2'-fluoro-cytidine-3'-phosphate
  modified_base 19: mod_base = OTHER; note = 2'-O-methyl-uridine-3'-thiophosphate-phosphate
  modified_base 20: mod_base = OTHER; note = 2'-O-methyl-uridine-3'-thiophosphate-phosphate
  modified_base 21: mod_base = OTHER; note = 2'-O-methyl-uridine-3'-phosphate
tatgaaaatagctttgacttt

SEQ ID NO: 1855 - RNA, 19 nt, synthetic construct
  source 1..19: mol_type = other RNA
  modified_base 1: mod_base = OTHER; note = 2'-O-methyl-adenosine-3'-thiophosphate-phosphate
  modified_base 2: mod_base = OTHER; note = 2'-O-methyl-guanosine-3'-thiophosphate-phosphate
  modified_base 3: mod_base = OTHER; note = 2'-O-methyl-uridine-3'-phosphate
  modified_base 4: mod_base = OTHER; note = 2'-O-methyl-cytidine-3'-phosphate
  modified_base 5: mod_base = OTHER; note = 2'-O-methyl-adenosine-3'-phosphate
  modified_base 6: mod_base = OTHER; note = 2'-O-methyl-adenosine-3'-phosphate
  modified_base 7: mod_base = OTHER; note = 2'-fluoro-adenosine-3'-phosphate
  modified_base 8: mod_base = OTHER; note = 2'-fluoro-guanosine-3'-phosphate
  modified_base 9: mod_base = OTHER; note = 2'-fluoro-cytidine-3'-phosphate
  modified_base 10: mod_base = OTHER; note = 2'-O-methyl-uridine-3'-phosphate
  modified_base 11: mod_base = OTHER; note = 2'-O-methyl-adenosine-3'-phosphate
  modified_base 12: mod_base = OTHER; note = 2'-O-methyl-uridine-3'-phosphate
  modified_base 13: mod_base = OTHER; note = 2'-O-methyl-uridine-3'-phosphate
  modified_base 14: mod_base = OTHER; note = 2'-O-methyl-uridine-3'-phosphate
  modified_base 15: mod_base = OTHER; note = 2'-O-methyl-uridine-3'-phosphate
  modified_base 16: mod_base = OTHER; note = 2'-O-methyl-cytidine-3'-phosphate
  modified_base 17: mod_base = OTHER; note = 2'-O-methyl-adenosine-3'-phosphate
  modified_base 18: mod_base = OTHER; note = 2'-O-methyl-uridine-3'-phosphate
  modified_base 19: mod_base = OTHER; note = 2'-O-methyl-adenosine-3'-phosphate
agtcaaagctattttcata

SEQ ID NO: 1856 - RNA, 21 nt, synthetic construct
  source 1..21: mol_type = other RNA
  modified_base 1: mod_base = OTHER; note = 2'-O-methyl-uridine-3'-thiophosphate-phosphate
  modified_base 2: mod_base = OTHER; note = 2'-deoxy-adenosine-3'-thiophosphate-phosphate
  modified_base 3: mod_base = OTHER; note = 2'-O-methyl-uridine-3'-phosphate
  modified_base 4: mod_base = OTHER; note = 2'-fluoro-guanosine-3'-phosphate
  modified_base 5: mod_base = OTHER; note = 2'-deoxy-adenosine-3'-phosphate
  modified_base 6: mod_base = OTHER; note = 2'-fluoro-adenosine-3'-phosphate
  modified_base 7: mod_base = OTHER; note = 2'-deoxy-adenosine-3'-phosphate
  modified_base 8: mod_base = OTHER; note = 2'-fluoro-adenosine-3'-phosphate
  modified_base 9: mod_base = OTHER; note = 2'-O-methyl-uridine-3'-phosphate
  modified_base 10: mod_base = OTHER; note = 2'-O-methyl-adenosine-3'-phosphate
  modified_base 11: mod_base = OTHER; note = 2'-O-methyl-guanosine-3'-phosphate
  modified_base 12: mod_base = OTHER; note = 2'-deoxy-cytidine-3'-phosphate
  modified_base 13: mod_base = OTHER; note = 2'-O-methyl-uridine-3'-phosphate
  modified_base 14: mod_base = OTHER; note = 2'-fluoro-uridine-3'-phosphate
  modified_base 15: mod_base = OTHER; note = 2'-O-methyl-uridine-3'-phosphate
  modified_base 16: mod_base = OTHER; note = 2'-O-methyl-guanosine-3'-phosphate
  modified_base 17: mod_base = OTHER; note = 2'-O-methyl-adenosine-3'-phosphate
  modified_base 18: mod_base = OTHER; note = 2'-O-methyl-cytidine-3'-phosphate
  modified_base 19: mod_base = OTHER; note = 2'-O-methyl-uridine-3'-thiophosphate-phosphate
  modified_base 20: mod_base = OTHER; note = 2'-O-methyl-uridine-3'-thiophosphate-phosphate
  modified_base 21: mod_base = OTHER; note = 2'-O-methyl-uridine-3'-phosphate
tatgaaaatagctttgacttt

SEQ ID NO: 1857 - RNA, 19 nt, synthetic construct
  source 1..19: mol_type = other RNA
  modified_base 1: mod_base = OTHER; note = 2'-O-methyl-adenosine-3'-thiophosphate-phosphate
  modified_base 2: mod_base = OTHER; note = 2'-O-methyl-guanosine-3'-thiophosphate-phosphate
  modified_base 3: mod_base = OTHER; note = 2'-O-methyl-uridine-3'-phosphate
  modified_base 4: mod_base = OTHER; note = 2'-O-methyl-cytidine-3'-phosphate
  modified_base 5: mod_base = OTHER; note = 2'-O-methyl-adenosine-3'-phosphate
  modified_base 6: mod_base = OTHER; note = 2'-O-methyl-adenosine-3'-phosphate
  modified_base 7: mod_base = OTHER; note = 2'-fluoro-adenosine-3'-phosphate
  modified_base 8: mod_base = OTHER; note = 2'-fluoro-guanosine-3'-phosphate
  modified_base 9: mod_base = OTHER; note = 2'-fluoro-cytidine-3'-phosphate
  modified_base 10: mod_base = OTHER; note = 2'-O-methyl-uridine-3'-phosphate
  modified_base 11: mod_base = OTHER; note = 2'-O-methyl-adenosine-3'-phosphate
  modified_base 12: mod_base = OTHER; note = 2'-O-methyl-uridine-3'-phosphate
  modified_base 13: mod_base = OTHER; note = 2'-O-methyl-uridine-3'-phosphate
  modified_base 14: mod_base = OTHER; note = 2'-O-methyl-uridine-3'-phosphate
  modified_base 15: mod_base = OTHER; note = 2'-O-methyl-uridine-3'-phosphate
  modified_base 16: mod_base = OTHER; note = 2'-O-methyl-cytidine-3'-phosphate
  modified_base 17: mod_base = OTHER; note = 2'-O-methyl-adenosine-3'-phosphate
  modified_base 18: mod_base = OTHER; note = 2'-O-methyl-uridine-3'-phosphate
  modified_base 19: mod_base = OTHER; note = 2'-O-methyl-adenosine-3'-phosphate
agtcaaagctattttcata

SEQ ID NO: 1858 - RNA, 21 nt, synthetic construct
  source 1..21: mol_type = other RNA
  modified_base 1: mod_base = OTHER; note = 2'-O-methyl-uridine-3'-thiophosphate-phosphate
  modified_base 2: mod_base = OTHER; note = 2'-deoxy-adenosine-3'-thiophosphate-phosphate
  modified_base 3: mod_base = OTHER; note = 2'-O-methyl-uridine-3'-phosphate
  modified_base 4: mod_base = OTHER; note = 2'-fluoro-hypoxanthine-3'-phosphate
  modified_base 5: mod_base = OTHER; note = 2'-deoxy-adenosine-3'-phosphate
  modified_base 6: mod_base = OTHER; note = 2'-fluoro-adenosine-3'-phosphate
  modified_base 7: mod_base = OTHER; note = 2'-deoxy-adenosine-3'-phosphate
  modified_base 8: mod_base = OTHER; note = 2'-fluoro-adenosine-3'-phosphate
  modified_base 9: mod_base = OTHER; note = 2'-O-methyl-uridine-3'-phosphate
  modified_base 10: mod_base = OTHER; note = 2'-O-methyl-adenosine-3'-phosphate
  modified_base 11: mod_base = OTHER; note = 2'-O-methyl-guanosine-3'-phosphate
  modified_base 12: mod_base = OTHER; note = 2'-deoxy-cytidine-3'-phosphate
  modified_base 13: mod_base = OTHER; note = 2'-O-methyl-uridine-3'-phosphate
  modified_base 14: mod_base = OTHER; note = 2'-fluoro-uridine-3'-phosphate
  modified_base 15: mod_base = OTHER; note = 2'-O-methyl-uridine-3'-phosphate
  modified_base 16: mod_base = OTHER; note = 2'-fluoro-guanosine-3'-phosphate
  modified_base 17: mod_base = OTHER; note = 2'-O-methyl-adenosine-3'-phosphate
  modified_base 18: mod_base = OTHER; note = 2'-fluoro-cytidine-3'-phosphate
  modified_base 19: mod_base = OTHER; note = 2'-O-methyl-uridine-3'-thiophosphate-phosphate
  modified_base 20: mod_base = OTHER; note = 2'-O-methyl-uridine-3'-thiophosphate-phosphate
  modified_base 21: mod_base = OTHER; note = 2'-O-methyl-uridine-3'-phosphate
tatnaaaatagctttgacttt

SEQ ID NO: 1859 - RNA, 19 nt, synthetic construct
  source 1..19: mol_type = other RNA
  modified_base 1: mod_base = OTHER; note = 2'-O-methyl-adenosine-3'-thiophosphate-phosphate
  modified_base 2: mod_base = OTHER; note = 2'-O-methyl-guanosine-3'-thiophosphate-phosphate
  modified_base 3: mod_base = OTHER; note = 2'-O-methyl-uridine-3'-phosphate
  modified_base 4: mod_base = OTHER; note = 2'-O-methyl-cytidine-3'-phosphate
  modified_base 5: mod_base = OTHER; note = 2'-O-methyl-adenosine-3'-phosphate
  modified_base 6: mod_base = OTHER; note = 2'-O-methyl-adenosine-3'-phosphate
  modified_base 7: mod_base = OTHER; note = 2'-fluoro-adenosine-3'-phosphate
  modified_base 8: mod_base = OTHER; note = 2'-fluoro-guanosine-3'-phosphate
  modified_base 9: mod_base = OTHER; note = 2'-fluoro-cytidine-3'-phosphate
  modified_base 10: mod_base = OTHER; note = 2'-O-methyl-uridine-3'-phosphate
  modified_base 11: mod_base = OTHER; note = 2'-O-methyl-adenosine-3'-phosphate
  modified_base 12: mod_base = OTHER; note = 2'-O-methyl-uridine-3'-phosphate
  modified_base 13: mod_base = OTHER; note = 2'-O-methyl-uridine-3'-phosphate
  modified_base 14: mod_base = OTHER; note = 2'-O-methyl-uridine-3'-phosphate
  modified_base 15: mod_base = OTHER; note = 2'-O-methyl-uridine-3'-phosphate
  modified_base 16: mod_base = OTHER; note = 2'-O-methyl-cytidine-3'-phosphate
  modified_base 17: mod_base = OTHER; note = 2'-O-methyl-adenosine-3'-phosphate
  modified_base 18: mod_base = OTHER; note = 2'-O-methyl-uridine-3'-phosphate
  modified_base 19: mod_base = OTHER; note = 2'-O-methyl-adenosine-3'-phosphate
agtcaaagctattttcata

SEQ ID NO: 1860 - RNA, 21 nt, synthetic construct
  source 1..21: mol_type = other RNA
  modified_base 1: mod_base = OTHER; note = 2'-O-methyl-uridine-3'-thiophosphate-phosphate
  modified_base 2: mod_base = OTHER; note = 2'-deoxy-adenosine-3'-thiophosphate-phosphate
  modified_base 3: mod_base = OTHER; note = 2'-O-methyl-uridine-3'-phosphate
  modified_base 4: mod_base = OTHER; note = 2'-fluoro-hypoxanthine-3'-phosphate
  modified_base 5: mod_base = OTHER; note = 2'-deoxy-adenosine-3'-phosphate
  modified_base 6: mod_base = OTHER; note = 2'-fluoro-adenosine-3'-phosphate
  modified_base 7: mod_base = OTHER; note = 2'-deoxy-adenosine-3'-phosphate
  modified_base 8: mod_base = OTHER; note = 2'-fluoro-adenosine-3'-phosphate
  modified_base 9: mod_base = OTHER; note = 2'-O-methyl-uridine-3'-phosphate
  modified_base 10: mod_base = OTHER; note = 2'-O-methyl-adenosine-3'-phosphate
  modified_base 11: mod_base = OTHER; note = 2'-O-methyl-guanosine-3'-phosphate
  modified_base 12: mod_base = OTHER; note = 2'-deoxy-cytidine-3'-phosphate
  modified_base 13: mod_base = OTHER; note = 2'-O-methyl-uridine-3'-phosphate
  modified_base 14: mod_base = OTHER; note = 2'-fluoro-uridine-3'-phosphate
  modified_base 15: mod_base = OTHER; note = 2'-O-methyl-uridine-3'-phosphate
  modified_base 16: mod_base = OTHER; note = 2'-O-methyl-guanosine-3'-phosphate
  modified_base 17: mod_base = OTHER; note = 2'-O-methyl-adenosine-3'-phosphate
  modified_base 18: mod_base = OTHER; note = 2'-O-methyl-cytidine-3'-phosphate
  modified_base 19: mod_base = OTHER; note = 2'-O-methyl-uridine-3'-thiophosphate-phosphate
  modified_base 20: mod_base = OTHER; note = 2'-O-methyl-uridine-3'-thiophosphate-phosphate
  modified_base 21: mod_base = OTHER; note = 2'-O-methyl-uridine-3'-phosphate
tatnaaaatagctttgacttt

SEQ ID NO: 1861 - RNA, 19 nt, synthetic construct
  source 1..19: mol_type = other RNA
  modified_base 1: mod_base = OTHER; note = 2'-O-methyl-adenosine-3'-thiophosphate-phosphate
  modified_base 2: mod_base = OTHER; note = 2'-O-methyl-guanosine-3'-thiophosphate-phosphate
  modified_base 3: mod_base = OTHER; note = 2'-O-methyl-uridine-3'-phosphate
  modified_base 4: mod_base = OTHER; note = 2'-O-methyl-cytidine-3'-phosphate
  modified_base 5: mod_base = OTHER; note = 2'-O-methyl-adenosine-3'-phosphate
  modified_base 6: mod_base = OTHER; note = 2'-O-methyl-adenosine-3'-phosphate
  modified_base 7: mod_base = OTHER; note = 2'-fluoro-adenosine-3'-phosphate
  modified_base 8: mod_base = OTHER; note = 2'-fluoro-guanosine-3'-phosphate
  modified_base 9: mod_base = OTHER; note = 2'-fluoro-cytidine-3'-phosphate
  modified_base 10: mod_base = OTHER; note = 2'-O-methyl-uridine-3'-phosphate
  modified_base 11: mod_base = OTHER; note = 2'-O-methyl-adenosine-3'-phosphate
  modified_base 12: mod_base = OTHER; note = 2'-O-methyl-uridine-3'-phosphate
  modified_base 13: mod_base = OTHER; note = 2'-O-methyl-uridine-3'-phosphate
  modified_base 14: mod_base = OTHER; note = 2'-O-methyl-uridine-3'-phosphate
  modified_base 15: mod_base = OTHER; note = 2'-O-methyl-uridine-3'-phosphate
  modified_base 16: mod_base = OTHER; note = 2'-O-methyl-cytidine-3'-phosphate
  modified_base 17: mod_base = OTHER; note = 2'-O-methyl-adenosine-3'-thiophosphate-phosphate
  modified_base 18: mod_base = OTHER; note = 2'-O-methyl-uridine-3'-thiophosphate-phosphate
  modified_base 19: mod_base = OTHER; note = 2'-O-methyl-adenosine-3'-phosphate
agtcaaagctattttcata

SEQ ID NO: 1862 - RNA, 21 nt, synthetic construct
  source 1..21: mol_type = other RNA
  modified_base 1: mod_base = OTHER; note = 2'-O-methyl-uridine-3'-thiophosphate-phosphate
  modified_base 2: mod_base = OTHER; note = 2'-deoxy-adenosine-3'-thiophosphate-phosphate
  modified_base 3: mod_base = OTHER; note = 2'-O-methyl-uridine-3'-phosphate
  modified_base 4: mod_base = OTHER; note = 2'-fluoro-guanosine-3'-phosphate
  modified_base 5: mod_base = OTHER; note = 2'-deoxy-adenosine-3'-phosphate
  modified_base 6: mod_base = OTHER; note = 2'-fluoro-adenosine-3'-phosphate
  modified_base 7: mod_base = OTHER; note = 2'-deoxy-adenosine-3'-phosphate
  modified_base 8: mod_base = OTHER; note = 2'-fluoro-adenosine-3'-phosphate
  modified_base 9: mod_base = OTHER; note = 2'-O-methyl-uridine-3'-phosphate
  modified_base 10: mod_base = OTHER; note = 2'-O-methyl-adenosine-3'-phosphate
  modified_base 11: mod_base = OTHER; note = 2'-O-methyl-guanosine-3'-phosphate
  modified_base 12: mod_base = OTHER; note = 2'-deoxy-cytidine-3'-phosphate
  modified_base 13: mod_base = OTHER; note = 2'-O-methyl-uridine-3'-phosphate
  modified_base 14: mod_base = OTHER; note = 2'-fluoro-uridine-3'-phosphate
  modified_base 15: mod_base = OTHER; note = 2'-O-methyl-uridine-3'-phosphate
  modified_base 16: mod_base = OTHER; note = 2'-fluoro-guanosine-3'-phosphate
  modified_base 17: mod_base = OTHER; note = 2'-O-methyl-adenosine-3'-phosphate
  modified_base 18: mod_base = OTHER; note = 2'-fluoro-cytidine-3'-phosphate
  modified_base 19: mod_base = OTHER; note = 2'-O-methyl-uridine-3'-thiophosphate-phosphate
  modified_base 20: mod_base = OTHER; note = 2'-O-methyl-uridine-3'-thiophosphate-phosphate
  modified_base 21: mod_base = OTHER; note = 2'-O-methyl-uridine-3'-phosphate
tatgaaaatagctttgacttt

SEQ ID NO: 1863 - RNA, 19 nt, synthetic construct
  source 1..19: mol_type = other RNA
  modified_base 1: mod_base = OTHER; note = inverted 2'-O-methyl-adenosine-3'-thiophosphate-phosphate
  modified_base 2: mod_base = OTHER; note = 2'-O-methyl-guanosine-3'-thiophosphate-phosphate
  modified_base 3: mod_base = OTHER; note = 2'-O-methyl-uridine-3'-phosphate
  modified_base 4: mod_base = OTHER; note = 2'-O-methyl-cytidine-3'-phosphate
  modified_base 5: mod_base = OTHER; note = 2'-O-methyl-adenosine-3'-phosphate
  modified_base 6: mod_base = OTHER; note = 2'-O-methyl-adenosine-3'-phosphate
  modified_base 7: mod_base = OTHER; note = 2'-fluoro-adenosine-3'-phosphate
  modified_base 8: mod_base = OTHER; note = 2'-fluoro-guanosine-3'-phosphate
  modified_base 9: mod_base = OTHER; note = 2'-fluoro-cytidine-3'-phosphate
  modified_base 10: mod_base = OTHER; note = 2'-O-methyl-uridine-3'-phosphate
  modified_base 11: mod_base = OTHER; note = 2'-O-methyl-adenosine-3'-phosphate
  modified_base 12: mod_base = OTHER; note = 2'-O-methyl-uridine-3'-phosphate
  modified_base 13: mod_base = OTHER; note = 2'-O-methyl-uridine-3'-phosphate
  modified_base 14: mod_base = OTHER; note = 2'-O-methyl-uridine-3'-phosphate
  modified_base 15: mod_base = OTHER; note = 2'-O-methyl-uridine-3'-phosphate
  modified_base 16: mod_base = OTHER; note = 2'-O-methyl-cytidine-3'-phosphate
  modified_base 17: mod_base = OTHER; note = 2'-O-methyl-adenosine-3'-thiophosphate-phosphate
  modified_base 18: mod_base = OTHER; note = 2'-O-methyl-uridine-3'-thiophosphate-phosphate
  modified_base 19: mod_base = OTHER; note = 2'-O-methyl-adenosine-3'-phosphate
agtcaaagctattttcata

SEQ ID NO: 1864 - RNA, 21 nt, synthetic construct
  source 1..21: mol_type = other RNA
  modified_base 1: mod_base = OTHER; note = 2'-O-methyl-uridine-3'-thiophosphate-phosphate
  modified_base 2: mod_base = OTHER; note = 2'-deoxy-adenosine-3'-thiophosphate-phosphate
  modified_base 3: mod_base = OTHER; note = 2'-O-methyl-uridine-3'-phosphate
  modified_base 4: mod_base = OTHER; note = 2'-fluoro-guanosine-3'-phosphate
  modified_base 5: mod_base = OTHER; note = 2'-deoxy-adenosine-3'-phosphate
  modified_base 6: mod_base = OTHER; note = 2'-fluoro-adenosine-3'-phosphate
  modified_base 7: mod_base = OTHER; note = 2'-deoxy-adenosine-3'-phosphate
  modified_base 8: mod_base = OTHER; note = 2'-fluoro-adenosine-3'-phosphate
  modified_base 9: mod_base = OTHER; note = 2'-O-methyl-uridine-3'-phosphate
  modified_base 10: mod_base = OTHER; note = 2'-O-methyl-adenosine-3'-phosphate
  modified_base 11: mod_base = OTHER; note = 2'-O-methyl-guanosine-3'-phosphate
  modified_base 12: mod_base = OTHER; note = 2'-deoxy-cytidine-3'-phosphate
  modified_base 13: mod_base = OTHER; note = 2'-O-methyl-uridine-3'-phosphate
  modified_base 14: mod_base = OTHER; note = 2'-fluoro-uridine-3'-phosphate
  modified_base 15: mod_base = OTHER; note = 2'-O-methyl-uridine-3'-phosphate
  modified_base 16: mod_base = OTHER; note = 2'-fluoro-guanosine-3'-phosphate
  modified_base 17: mod_base = OTHER; note = 2'-O-methyl-adenosine-3'-phosphate
  modified_base 18: mod_base = OTHER; note = 2'-fluoro-cytidine-3'-phosphate
  modified_base 19: mod_base = OTHER; note = 2'-O-methyl-uridine-3'-thiophosphate-phosphate
  modified_base 20: mod_base = OTHER; note = 2'-O-methyl-uridine-3'-thiophosphate-phosphate
  modified_base 21: mod_base = OTHER; note = 2'-O-methyl-uridine-3'-phosphate
tatgaaaatagctttgacttt

SEQ ID NO: 1865 - RNA, 21 nt, synthetic construct
  source 1..21: mol_type = other RNA
  modified_base 1: mod_base = OTHER; note = 2'-O-methyl-adenosine-3'-thiophosphate-phosphate
  modified_base 2: mod_base = OTHER; note = 2'-O-methyl-adenosine-3'-thiophosphate-phosphate
  modified_base 3: mod_base = OTHER; note = 2'-O-methyl-adenosine-3'-phosphate
  modified_base 4: mod_base = OTHER; note = 2'-O-methyl-guanosine-3'-phosphate
  modified_base 5: mod_base = OTHER; note = 2'-O-methyl-uridine-3'-phosphate
  modified_base 6: mod_base = OTHER; note = 2'-O-methyl-cytidine-3'-phosphate
  modified_base 7: mod_base = OTHER; note = 2'-O-methyl-adenosine-3'-phosphate
  modified_base 8: mod_base = OTHER; note = 2'-O-methyl-adenosine-3'-phosphate
  modified_base 9: mod_base = OTHER; note = 2'-fluoro-adenosine-3'-phosphate
  modified_base 10: mod_base = OTHER; note = 2'-fluoro-guanosine-3'-phosphate
  modified_base 11: mod_base = OTHER; note = 2'-fluoro-cytidine-3'-phosphate
  modified_base 12: mod_base = OTHER; note = 2'-O-methyl-uridine-3'-phosphate
  modified_base 13: mod_base = OTHER; note = 2'-O-methyl-adenosine-3'-phosphate
  modified_base 14: mod_base = OTHER; note = 2'-O-methyl-uridine-3'-phosphate
  modified_base 15: mod_base = OTHER; note = 2'-O-methyl-uridine-3'-phosphate
  modified_base 16: mod_base = OTHER; note = 2'-O-methyl-uridine-3'-phosphate
  modified_base 17: mod_base = OTHER; note = 2'-O-methyl-uridine-3'-phosphate
  modified_base 18: mod_base = OTHER; note = 2'-O-methyl-cytidine-3'-phosphate
  modified_base 19: mod_base = OTHER; note = 2'-O-methyl-adenosine-3'-thiophosphate-phosphate
  modified_base 20: mod_base = OTHER; note = 2'-O-methyl-uridine-3'-thiophosphate-phosphate
  modified_base 21: mod_base = OTHER; note = 2'-O-methyl-adenosine-3'-phosphate
aaagtcaaagctattttcata

SEQ ID NO: 1866 - RNA, 21 nt, synthetic construct
  source 1..21: mol_type = other RNA
  modified_base 1: mod_base = OTHER; note = 2'-O-methyl-uridine-3'-thiophosphate-phosphate
  modified_base 2: mod_base = OTHER; note = 2'-deoxy-adenosine-3'-thiophosphate-phosphate
  modified_base 3: mod_base = OTHER; note = 2'-O-methyl-uridine-3'-phosphate
  modified_base 4: mod_base = OTHER; note = 2'-fluoro-guanosine-3'-phosphate
  modified_base 5: mod_base = OTHER; note = 2'-deoxy-adenosine-3'-phosphate
  modified_base 6: mod_base = OTHER; note = 2'-fluoro-adenosine-3'-phosphate
  modified_base 7: mod_base = OTHER; note = 2'-deoxy-adenosine-3'-phosphate
  modified_base 8: mod_base = OTHER; note = 2'-fluoro-adenosine-3'-phosphate
  modified_base 9: mod_base = OTHER; note = 2'-O-methyl-uridine-3'-phosphate
  modified_base 10: mod_base = OTHER; note = 2'-O-methyl-adenosine-3'-phosphate
  modified_base 11: mod_base = OTHER; note = 2'-O-methyl-guanosine-3'-phosphate
  modified_base 12: mod_base = OTHER; note = 2'-deoxy-cytidine-3'-phosphate
  modified_base 13: mod_base = OTHER; note = 2'-O-methyl-uridine-3'-phosphate
  modified_base 14: mod_base = OTHER; note = 2'-fluoro-uridine-3'-phosphate
  modified_base 15: mod_base = OTHER; note = 2'-O-methyl-uridine-3'-phosphate
  modified_base 16: mod_base = OTHER; note = 2'-fluoro-guanosine-3'-phosphate
  modified_base 17: mod_base = OTHER; note = 2'-O-methyl-adenosine-3'-phosphate
  modified_base 18: mod_base = OTHER; note = 2'-fluoro-cytidine-3'-phosphate
  modified_base 19: mod_base = OTHER; note = 2'-O-methyl-uridine-3'-thiophosphate-phosphate
  modified_base 20: mod_base = OTHER; note = 2'-O-methyl-uridine-3'-thiophosphate-phosphate
  modified_base 21: mod_base = OTHER; note = 2'-O-methyl-uridine-3'-phosphate
tatgaaaatagctttgacttt

SEQ ID NO: 1867 - RNA, 21 nt, synthetic construct
  source 1..21: mol_type = other RNA
  modified_base 1: mod_base = OTHER; note = inverted 2'-O-methyl-adenosine-3'-thiophosphate-phosphate
  modified_base 2: mod_base = OTHER; note = 2'-O-methyl-adenosine-3'-thiophosphate-phosphate
  modified_base 3: mod_base = OTHER; note = 2'-O-methyl-adenosine-3'-phosphate
  modified_base 4: mod_base = OTHER; note = 2'-O-methyl-guanosine-3'-phosphate
  modified_base 5: mod_base = OTHER; note = 2'-O-methyl-uridine-3'-phosphate
  modified_base 6: mod_base = OTHER; note = 2'-O-methyl-cytidine-3'-phosphate
  modified_base 7: mod_base = OTHER; note = 2'-O-methyl-adenosine-3'-phosphate
  modified_base 8: mod_base = OTHER; note = 2'-O-methyl-adenosine-3'-phosphate
  modified_base 9: mod_base = OTHER; note = 2'-fluoro-adenosine-3'-phosphate
  modified_base 10: mod_base = OTHER; note = 2'-fluoro-guanosine-3'-phosphate
  modified_base 11: mod_base = OTHER; note = 2'-fluoro-cytidine-3'-phosphate
  modified_base 12: mod_base = OTHER; note = 2'-O-methyl-uridine-3'-phosphate
  modified_base 13: mod_base = OTHER; note = 2'-O-methyl-adenosine-3'-phosphate
  modified_base 14: mod_base = OTHER; note = 2'-O-methyl-uridine-3'-phosphate
  modified_base 15: mod_base = OTHER; note = 2'-O-methyl-uridine-3'-phosphate
  modified_base 16: mod_base = OTHER; note = 2'-O-methyl-uridine-3'-phosphate
  modified_base 17: mod_base = OTHER; note = 2'-O-methyl-uridine-3'-phosphate
  modified_base 18: mod_base = OTHER; note = 2'-O-methyl-cytidine-3'-phosphate
  modified_base 19: mod_base = OTHER; note = 2'-O-methyl-adenosine-3'-thiophosphate-phosphate
  modified_base 20: mod_base = OTHER; note = 2'-O-methyl-uridine-3'-thiophosphate-phosphate
  modified_base 21: mod_base = OTHER; note = 2'-O-methyl-adenosine-3'-phosphate
aaagtcaaagctattttcata

SEQ ID NO: 1868 - RNA, 21 nt, synthetic construct
  source 1..21: mol_type = other RNA
  modified_base 1: mod_base = OTHER; note = 2'-O-methyl-uridine-3'-thiophosphate-phosphate
  modified_base 2: mod_base = OTHER; note = 2'-deoxy-adenosine-3'-thiophosphate-phosphate
  modified_base 3: mod_base = OTHER; note = 2'-O-methyl-uridine-3'-phosphate
  modified_base 4: mod_base = OTHER; note = 2'-fluoro-guanosine-3'-phosphate
  modified_base 5: mod_base = OTHER; note = 2'-deoxy-adenosine-3'-phosphate
  modified_base 6: mod_base = OTHER; note = 2'-fluoro-adenosine-3'-phosphate
  modified_base 7: mod_base = OTHER; note = 2'-deoxy-adenosine-3'-phosphate
  modified_base 8: mod_base = OTHER; note = 2'-fluoro-adenosine-3'-phosphate
  modified_base 9: mod_base = OTHER; note = 2'-O-methyl-uridine-3'-phosphate
  modified_base 10: mod_base = OTHER; note = 2'-O-methyl-adenosine-3'-phosphate
  modified_base 11: mod_base = OTHER; note = 2'-O-methyl-guanosine-3'-phosphate
  modified_base 12: mod_base = OTHER; note = 2'-deoxy-cytidine-3'-phosphate
  modified_base 13: mod_base = OTHER; note = 2'-O-methyl-uridine-3'-phosphate
  modified_base 14: mod_base = OTHER; note = 2'-fluoro-uridine-3'-phosphate
  modified_base 15: mod_base = OTHER; note = 2'-O-methyl-uridine-3'-phosphate
  modified_base 16: mod_base = OTHER; note = 2'-fluoro-guanosine-3'-phosphate
  modified_base 17: mod_base = OTHER; note = 2'-O-methyl-adenosine-3'-phosphate
  modified_base 18: mod_base = OTHER; note = 2'-fluoro-cytidine-3'-phosphate
  modified_base 19: mod_base = OTHER; note = 2'-O-methyl-uridine-3'-thiophosphate-phosphate
  modified_base 20: mod_base = OTHER; note = 2'-O-methyl-uridine-3'-thiophosphate-phosphate
  modified_base 21: mod_base = OTHER; note = 2'-O-methyl-uridine-3'-phosphate
tatgaaaatagctttgacttt

SEQ ID NO: 1869 - RNA, 19 nt, synthetic construct
  source 1..19: mol_type = other RNA
  modified_base 1: mod_base = OTHER; note = inverted 2'-O-methyl-adenosine-3'-thiophosphate-phosphate
  modified_base 2: mod_base = OTHER; note = 2'-O-methyl-guanosine-3'-thiophosphate-phosphate
  modified_base 3: mod_base = OTHER; note = 2'-O-methyl-uridine-3'-phosphate
  modified_base 4: mod_base = OTHER; note = 2'-O-methyl-cytidine-3'-phosphate
  modified_base 5: mod_base = OTHER; note = 2'-O-methyl-adenosine-3'-phosphate
  modified_base 6: mod_base = OTHER; note = 2'-O-methyl-adenosine-3'-phosphate
  modified_base 7: mod_base = OTHER; note = 2'-fluoro-adenosine-3'-phosphate
  modified_base 8: mod_base = OTHER; note = 2'-fluoro-guanosine-3'-phosphate
  modified_base 9: mod_base = OTHER; note = 2'-fluoro-cytidine-3'-phosphate
  modified_base 10: mod_base = OTHER; note = 2'-O-methyl-uridine-3'-phosphate
  modified_base 11: mod_base = OTHER; note = 2'-O-methyl-adenosine-3'-phosphate
  modified_base 12: mod_base = OTHER; note = 2'-O-methyl-uridine-3'-phosphate
  modified_base 13: mod_base = OTHER; note = 2'-O-methyl-uridine-3'-phosphate
  modified_base 14: mod_base = OTHER; note = 2'-O-methyl-uridine-3'-phosphate
  modified_base 15: mod_base = OTHER; note = 2'-O-methyl-uridine-3'-phosphate
  modified_base 16: mod_base = OTHER; note = 2'-O-methyl-cytidine-3'-phosphate
  modified_base 17: mod_base = OTHER; note = 2'-O-methyl-adenosine-3'-thiophosphate-phosphate
  modified_base 18: mod_base = OTHER; note = 2'-O-methyl-uridine-3'-thiophosphate-phosphate
  modified_base 19: mod_base = OTHER; note = 2'-O-methyl-adenosine-3'-phosphate
agtcaaagctattttcata

SEQ ID NO: 1870 - RNA, 21 nt, synthetic construct
  source 1..21: mol_type = other RNA
  modified_base 1: mod_base = OTHER; note = 2'-O-methyl-uridine-3'-thiophosphate-phosphate
  modified_base 2: mod_base = OTHER; note = 2'-deoxy-adenosine-3'-thiophosphate-phosphate
  modified_base 3: mod_base = OTHER; note = 2'-O-methyl-uridine-3'-phosphate
  modified_base 4: mod_base = OTHER; note = 2'-fluoro-guanosine-3'-phosphate
  modified_base 5: mod_base = OTHER; note = 2'-deoxy-adenosine-3'-phosphate
  modified_base 6: mod_base = OTHER; note = 2'-fluoro-adenosine-3'-phosphate
  modified_base 7: mod_base = OTHER; note = 2'-deoxy-adenosine-3'-phosphate
  modified_base 8: mod_base = OTHER; note = 2'-fluoro-adenosine-3'-phosphate
  modified_base 9: mod_base = OTHER; note = 2'-O-methyl-uridine-3'-phosphate
  modified_base 10: mod_base = OTHER; note = 2'-O-methyl-adenosine-3'-phosphate
  modified_base 11: mod_base = OTHER; note = 2'-O-methyl-guanosine-3'-phosphate
  modified_base 12: mod_base = OTHER; note = 2'-deoxy-cytidine-3'-phosphate
  modified_base 13: mod_base = OTHER; note = 2'-O-methyl-uridine-3'-phosphate
  modified_base 14: mod_base = OTHER; note = 2'-fluoro-uridine-3'-phosphate
  modified_base 15: mod_base = OTHER; note = 2'-O-methyl-uridine-3'-phosphate
  modified_base 16: mod_base = OTHER; note = 2'-O-methyl-guanosine-3'-phosphate
  modified_base 17: mod_base = OTHER; note = 2'-O-methyl-adenosine-3'-phosphate
  modified_base 18: mod_base = OTHER; note = 2'-O-methyl-cytidine-3'-phosphate
  modified_base 19: mod_base = OTHER; note = 2'-O-methyl-uridine-3'-thiophosphate-phosphate
  modified_base 20: mod_base = OTHER; note = 2'-O-methyl-uridine-3'-thiophosphate-phosphate
  modified_base 21: mod_base = OTHER; note = 2'-O-methyl-uridine-3'-phosphate
tatgaaaatagctttgacttt

SEQ ID NO: 1871 - RNA, 21 nt, synthetic construct
  source 1..21: mol_type = other RNA
  modified_base 1: mod_base = OTHER; note = inverted 2'-O-methyl-adenosine-3'-thiophosphate-phosphate
  modified_base 2: mod_base = OTHER; note = 2'-O-methyl-adenosine-3'-thiophosphate-phosphate
  modified_base 3: mod_base = OTHER; note = 2'-O-methyl-adenosine-3'-phosphate
  modified_base 4: mod_base = OTHER; note = 2'-O-methyl-guanosine-3'-phosphate
  modified_base 5: mod_base = OTHER; note = 2'-O-methyl-uridine-3'-phosphate
  modified_base 6: mod_base = OTHER; note = 2'-O-methyl-cytidine-3'-phosphate
  modified_base 7: mod_base = OTHER; note = 2'-O-methyl-adenosine-3'-phosphate
  modified_base 8: mod_base = OTHER; note = 2'-O-methyl-adenosine-3'-phosphate
  modified_base 9: mod_base = OTHER; note = 2'-fluoro-adenosine-3'-phosphate
  modified_base 10: mod_base = OTHER; note = 2'-fluoro-guanosine-3'-phosphate
  modified_base 11: mod_base = OTHER; note = 2'-fluoro-cytidine-3'-phosphate
  modified_base 12: mod_base = OTHER; note = 2'-O-methyl-uridine-3'-phosphate
  modified_base 13: mod_base = OTHER; note = 2'-O-methyl-adenosine-3'-phosphate
  modified_base 14: mod_base = OTHER; note = 2'-O-methyl-uridine-3'-phosphate
  modified_base 15: mod_base = OTHER; note = 2'-O-methyl-uridine-3'-phosphate
  modified_base 16: mod_base = OTHER; note = 2'-O-methyl-uridine-3'-phosphate
  modified_base 17: mod_base = OTHER; note = 2'-O-methyl-uridine-3'-phosphate
  modified_base 18: mod_base = OTHER; note = 2'-O-methyl-cytidine-3'-phosphate
  modified_base 19: mod_base = OTHER; note = 2'-O-methyl-adenosine-3'-thiophosphate-phosphate
  modified_base 20: mod_base = OTHER; note = 2'-O-methyl-uridine-3'-thiophosphate-phosphate
  modified_base 21: mod_base = OTHER; note = 2'-O-methyl-adenosine-3'-phosphate
aaagtcaaagctattttcata

SEQ ID NO: 1872 - RNA, 21 nt, synthetic construct
  source 1..21: mol_type = other RNA
  modified_base 1: mod_base = OTHER; note = 2'-O-methyl-uridine-3'-thiophosphate-phosphate
  modified_base 2: mod_base = OTHER; note = 2'-deoxy-adenosine-3'-thiophosphate-phosphate
  modified_base 3: mod_base = OTHER; note = 2'-O-methyl-uridine-3'-phosphate
  modified_base 4: mod_base = OTHER; note = 2'-fluoro-guanosine-3'-phosphate
  modified_base 5: mod_base = OTHER; note = 2'-deoxy-adenosine-3'-phosphate
  modified_base 6: mod_base = OTHER; note = 2'-fluoro-adenosine-3'-phosphate
  modified_base 7: mod_base = OTHER; note = 2'-deoxy-adenosine-3'-phosphate
  modified_base 8: mod_base = OTHER; note = 2'-fluoro-adenosine-3'-phosphate
  modified_base 9: mod_base = OTHER; note = 2'-O-methyl-uridine-3'-phosphate
  modified_base 10: mod_base = OTHER; note = 2'-O-methyl-adenosine-3'-phosphate
  modified_base 11: mod_base = OTHER; note = 2'-O-methyl-guanosine-3'-phosphate
  modified_base 12: mod_base = OTHER; note = 2'-deoxy-cytidine-3'-phosphate
  modified_base 13: mod_base = OTHER; note = 2'-O-methyl-uridine-3'-phosphate
  modified_base 14: mod_base = OTHER; note = 2'-fluoro-uridine-3'-phosphate
  modified_base 15: mod_base = OTHER; note = 2'-O-methyl-uridine-3'-phosphate
  modified_base 16: mod_base = OTHER; note = 2'-O-methyl-guanosine-3'-phosphate
  modified_base 17: mod_base = OTHER; note = 2'-O-methyl-adenosine-3'-phosphate
  modified_base 18: mod_base = OTHER; note = 2'-O-methyl-cytidine-3'-phosphate
  modified_base 19: mod_base = OTHER; note = 2'-O-methyl-uridine-3'-thiophosphate-phosphate
  modified_base 20: mod_base = OTHER; note = 2'-O-methyl-uridine-3'-thiophosphate-phosphate
  modified_base 21: mod_base = OTHER; note = 2'-O-methyl-uridine-3'-phosphate
tatgaaaatagctttgacttt

SEQ ID NO: 1873 - RNA, 19 nt, synthetic construct
  source 1..19: mol_type = other RNA
  modified_base 1: mod_base = OTHER; note = 2'-O-methyl-adenosine-3'-thiophosphate-phosphate
  modified_base 2: mod_base = OTHER; note = 2'-O-methyl-guanosine-3'-thiophosphate-phosphate
  modified_base 3: mod_base = OTHER; note = 2'-O-methyl-uridine-3'-phosphate
  modified_base 4: mod_base = OTHER; note = 2'-O-methyl-cytidine-3'-phosphate
  modified_base 5: mod_base = OTHER; note = 2'-O-methyl-adenosine-3'-phosphate
  modified_base 6: mod_base = OTHER; note = 2'-O-methyl-adenosine-3'-phosphate
  modified_base 7: mod_base = OTHER; note = 2'-fluoro-adenosine-3'-phosphate
  modified_base 8: mod_base = OTHER; note = 2'-fluoro-guanosine-3'-phosphate
  modified_base 9: mod_base = OTHER; note = 2'-fluoro-cytidine-3'-phosphate
  modified_base 10: mod_base = OTHER; note = 2'-O-methyl-uridine-3'-phosphate
  modified_base 11: mod_base = OTHER; note = 2'-O-methyl-adenosine-3'-phosphate
  modified_base 12: mod_base = OTHER; note = 2'-O-methyl-uridine-3'-phosphate
  modified_base 13: mod_base = OTHER; note = 2'-O-methyl-uridine-3'-phosphate
  modified_base 14: mod_base = OTHER; note = 2'-O-methyl-uridine-3'-phosphate
  modified_base 15: mod_base = OTHER; note = 2'-O-methyl-uridine-3'-phosphate
  modified_base 16: mod_base = OTHER; note = 2'-O-methyl-cytidine-3'-phosphate
  modified_base 17: mod_base = OTHER; note = 2'-O-methyl-adenosine-3'-thiophosphate-phosphate
  modified_base 18: mod_base = OTHER; note = 2'-O-methyl-uridine-3'-thiophosphate-phosphate
  modified_base 19: mod_base = OTHER; note = inverted 2'-O-methyl-adenosine-3'-phosphate
agtcaaagctattttcata

SEQ ID NO: 1874 - RNA, 21 nt, synthetic construct
  source 1..21: mol_type = other RNA
  modified_base 1: mod_base = OTHER; note = 2'-O-methyl-uridine-3'-thiophosphate-phosphate
  modified_base 2: mod_base = OTHER; note = 2'-fluoro-adenosine-3'-thiophosphate-phosphate
  modified_base 3: mod_base = OTHER; note = 2'-O-methyl-uridine-3'-phosphate
  modified_base 4: mod_base = OTHER; note = 2'-O-methyl-guanosine-3'-phosphate
  modified_base 5: mod_base = OTHER; note = 2'-fluoro-adenosine-3'-phosphate
  modified_base 6: mod_base = OTHER; note = 2'-fluoro-adenosine-3'-phosphate
  modified_base 7: mod_base = OTHER; note = 2'-O-methyl-adenosine-3'-phosphate
  modified_base 8: mod_base = OTHER; note = 2'-fluoro-adenosine-3'-phosphate
  modified_base 9: mod_base = OTHER; note = 2'-O-methyl-uridine-3'-phosphate
  modified_base 10: mod_base = OTHER; note = 2'-O-methyl-adenosine-3'-phosphate
  modified_base 11: mod_base = OTHER; note = 2'-O-methyl-guanosine-3'-phosphate
  modified_base 12: mod_base = OTHER; note = 2'-O-methyl-cytidine-3'-phosphate
  modified_base 13: mod_base = OTHER; note = 2'-O-methyl-uridine-3'-phosphate
  modified_base 14: mod_base = OTHER; note = 2'-fluoro-uridine-3'-phosphate
  modified_base 15: mod_base = OTHER; note = 2'-O-methyl-uridine-3'-phosphate
  modified_base 16: mod_base = OTHER; note = 2'-O-methyl-guanosine-3'-phosphate
  modified_base 17: mod_base = OTHER; note = 2'-O-methyl-adenosine-3'-phosphate
  modified_base 18: mod_base = OTHER; note = 2'-O-methyl-cytidine-3'-phosphate
  modified_base 19: mod_base = OTHER; note = 2'-O-methyl-uridine-3'-thiophosphate-phosphate
  modified_base 20: mod_base = OTHER; note = 2'-O-methyl-uridine-3'-thiophosphate-phosphate
  modified_base 21: mod_base = OTHER; note = 2'-O-methyl-uridine-3'-phosphate
tatgaaaatagctttgacttt

SEQ ID NO: 1875 - RNA, 2211 nt, Mus musculus
  source 1..2211: mol_type = mRNA
caagcaactggctctaaagaggccctgccagtagttagtcatgaactgtgagggtcacacatagctaccccaccaggcgatctactctcagtcttcctgagtcctaggctattgaggacaagtagcttggtctgctctttgtcaagggtagctgtgacactggtttgctgttgctgctgctgctgctgctgctgctgctgctgctgctgctgctgctgctgcttctgtatcctctttgggaaatcagactcataaaactgccacccattcgaggttctcaaagcagagccatctacctggagcatgaagcttccaaaagcccagctctggctaatactgctgtgggcattggtgtgggtgcagagtacaagatctgcgtgcccgtcctgtgggggcccaacactggcaccccaaggagaacgcgctctggtcctggagctagccaagcagcaaatcctggagggactgcacctaaccagccgtcccagaataactcggcctctgccccaggcagcactgaccagagccctccggagactgcagcccaagagcatggtccctggcaaccgagagaaagtcatcagctttgctaccatcatagacaaatccacttcaacctaccgctccatgctcaccttccagctgtcccctctttggtcccaccacctgtaccatgcccgcctctggctgcatgtgcctccctcttttccgggcactctgtacctgaggatcttccgttgcggcaccactaggtgccgaggattccgcaccttcctagctgagcaccaaaccacttcctctggctggcacgccctgactctgccctctagcggcttgcggagtgaggactctggcgtcgtgaaactccaactggaatttagacccctggaccttaacagcaccgctgcgggactgccacggctgctcttggacacagcgggacagcaacgtcccttcttggaacttaagatccgagctaatgaacctggagcaggtcgggccaggaggaggactcccacctgtgagcctgagacccccttatgttgtaggcgagaccactatgtagacttccaggagctggggtggcgggattggatcctgcagccggagggataccagctgaattactgcagtgggcagtgcccgccccacctggctggcagtcctggcattgctgcctccttccattctgccgtctttagcctcctcaaagccaacaacccttggcctgcgggttcttcctgctgtgtccccactgcacgaaggcctctctctctcctctaccttgaccataatggcaatgtggtcaagaccgatgtgccagacatggtagtagaggcctgtggctgcagctagcaacagggcctgaaggttctgggtgaagttcaaggttcaagttgggggttcccacgtgtctggaagctcgagttccggatccatactgacacccaataagctgtgtagcagtatgcctgggtttgacccctatggaacttaaatgggcgttttcttgtcccagattctggcctatttcaggctgtttcaaatgtggacagatgggtaaagcgttgcctttcaagggactgcctggccagcaccattttctacatcaagccctgttccaggacagcagggatgccgtgggagggaaggaagaacacagggagaaactatttagtctctcccgagaaagaagttcctcaagtaatgaaggcggaagtagaagggtgggcagattaggaaaagacaaacatacaggctaagaacagggtgcattgcctgctttgacaaggtcaagaggaagaggagcaggcgccgaggaaggaggggtgtcggggtccctggaatcgagaatcagtaaaaaggggtgctgaactcgtaagttcttaggcttccccctcgaggacaggacccacgcgggtgacatacattttatattttcttaataaaaaggagaaagaaaagcaccagagaattgtgtaaggggttgttaaaatgggccagaagcgaagtgtggtttggggacctctgtgccccagcgggtttctgagactttctcaggggttttcaagactattttcataatcacactgagatgttatttatcatttgctaccattatctttacattgtacagtgggaacagggtgtggtggcttacacttataactacagcaccgtgagttcaagaccggccttcatagtgaattc

What is claimed is:

1. A double-stranded ribonucleic acid interference (dsRNAi) agent useful for inhibiting expression of inhibin subunit beta E (INHBE) in a cell, wherein the dsRNAi agent comprises a sense strand and an antisense strand forming a double-stranded RNA (dsRNA) region, wherein the antisense strand comprises a region of complementarity to an INHBE mRNA, wherein the region of complementarity comprises at least 15 contiguous nucleotides, and wherein the dsRNAi agent comprises at least one non-canonical base pairing nucleotide.

2.-9. (canceled)

10. The dsRNAi agent of claim 1, wherein the dsRNAi agent comprises at least one additional modified nucleotide in the sense strand and/or the antisense strand.

11.-13. (canceled)

14. The dsRNAi agent of claim 1, wherein said at least one non-canonical base pairing nucleotide(s) is independently inosine (I), xanthosine (X), 7-methylguanosine (m7G), N6-methyladenosine (m6A), dihydrouridine, 5-methylcytosine (m5C), pseudouridine (Ψ), N1-methylpseudouridine (m1Ψ), or a combination thereof.

15. The dsRNAi agent of claim 14, wherein said at least one non-canonical base pairing nucleotide is inosine (I); and/or, wherein at least one guanine (G) is replaced with hypoxanthine (I) in the sense strand and/or the antisense strand.

16.-20. (canceled)

21. The dsRNAi agent of claim 10, wherein said at least one additional modified nucleotide is a 2′-O-methyl-modified nucleotide, a 2′-fluoro-modified nucleotide, a 2′-deoxy nucleotide, a 2′-methoxyethyl-modified nucleotide, a 2′-amino-modified nucleotide, a 2′-alkyl-modified nucleotide, a 2′-alkoxy-modified nucleotide, a 2′-F-arabino nucleotide, a phosphorothioate-modified nucleotide, an abasic nucleotide, a morpholino nucleotide, a locked nucleotide, an inverted nucleotide, a hypoxanthine base-substituted nucleotide, or a combination thereof.

22. (canceled)

23. The dsRNAi agent of claim 21, wherein the inverted base nucleotide is inverted A nucleotide, inverted dA nucleotide, inverted dT nucleotide, inverted C nucleotide or inverted U nucleotide.

24. The dsRNAi agent of claim 1, wherein the region of complementarity comprises at least 15, at least 16, at least 17, at least 18, at least 19, at least 20, at least 21, at least 22, or at least 23 contiguous nucleotides, or from 15 to 23 contiguous nucleotides, or from 15 to 21 contiguous nucleotides, or wherein the region of complementarity comprises 15, 16, 17, 18, 19, 20, 21, 22 or 23 contiguous nucleotides.

25. (canceled)

26. The dsRNAi agent of claim 1, wherein the difference in calculated melting temperature (ΔTm) of the dsRNA region or a portion thereof comprising said at least one non-canonical base pairing nucleotide compared to the same dsRNA region or portion thereof having no non-canonical base pairing nucleotide is at least 2° C.

27.-31. (canceled)

32. The dsRNAi agent of claim 15, wherein said at least one guanine (G) is G₀ comprised in the following sequence, according to the direction from the 5′ end to the 3′ end:
5′- N₁N₂G₀N₃N₄ -3′
wherein N₁, N₂, N₃, and N₄ are independently adenine (A), cytosine (C), G or uracil (U); wherein, if at least three (3) bases of N₁, N₂, N₃, and N₄ are adenine (A) or uracil (U), then the guanine in G₀ is replaced with hypoxanthine (I).

33. The dsRNAi agent of claim 1, wherein the dsRNAi agent comprises the following sequence on the antisense strand and/or the sense strand, according to the direction from the 5′ end to the 3′ end:
5′- N₁N₂G₀N₃N₄ -3′
wherein N₁, N₂, N₃, and N₄ are independently adenine (A), cytosine (C), G or uracil (U); wherein, if at least three (3) bases of N₁, N₂, N₃, and N₄ are adenine (A) or uracil (U), then the guanine in G₀ is replaced with a non-canonical base,
wherein the non-canonical base is the base in inosine (I), xanthosine (X), 7-methylguanosine (m7G), N6-methyladenosine (m6A), dihydrouridine, 5-methylcytosine (m5C), pseudouridine (Ψ), or N1-methylpseudouridine (m1Ψ), or wherein the non-canonical base is hypoxanthine (I).

34.-39. (canceled)

40. The dsRNAi agent of claim 1, wherein the antisense strand comprises at least 15 contiguous nucleotides differing by no more than 3 nucleotides from any one of the nucleotide sequences shown in Table 1 and Table 2, and the sense strand comprises at least 15 nucleotides complementary to the antisense strand; or,
wherein the dsRNAi agent comprises any one of the duplex sequences selected from IN-001 to IN-488, INI-001 to INI-308, and IN-489 to IN-546; or,
wherein the sense strand is 19 nucleotides in length which comprises 15 contiguous nucleotides as set forth in any one of SEQ ID NOs. 1621 to 1689; or
wherein the antisense strand is 21 nucleotides in length which comprises 15 contiguous nucleotides as set forth in any one of SEQ ID NOs. 1690 to 1758.

41.-72. (canceled)

73. The dsRNAi agent of claim 1, wherein the antisense strand comprises the nucleotide sequence set forth in any one of SEQ ID NO: 86, 182, 212, 350, 376, 402, 440, 460, 462, 464, 466, 468, 470, 472, 474, 476, 478, 480, 482, 484, 486, 488, 490, 492, 494, 496, 498, 500, 502, 502, 504, 506, 508, 510, 512, 514, 516, 518, 520, 522, 524, 526, 528, 530, 532, 534, 536, 538, 540, 542, 544, 546, 548, 550, 552, 554, 556, 558, 560, 562, 564, 566, 568, 570, 572, 574, 576, 578, 580, 582, 584, 586, 588, 590, 592, 594, 596, 598, 600, 602, 604, 606, 608, 610, 612, 614, 616, 618, 620, 622, 624, 626, 628, 630, 632, 634, 636, 638, 640, 642, 644, 646, 648, 650, 652, 654, 656, 658, 660, 662, 664, 666, 668, 670, 672, 674, 676, 678, 680, 682, 684, 686, 688, 690, 692, 694, 696, 698, 700, 702, 704, 706, 708, 710, 712, 714, 716, 718, 720, 722, 724, 726, 728, 730, 732, 734, 736, 738, 740, 742, 744, 746, 748, 750, 752, 754, 756, 758, 760, 762, 764, 766, 768, 770, 772, 774, 776, 778, 780, 782, 784, 786, 788, 790, 792, 794, 796, 798, 800, 802, 804, 806, 808, 810, 812, 814, 816, 818, 820, 822, 824, 826, 828, 830, 832, 834, 836, 838, 840, 842, 844, 846, 848, 850, 852, 854, 856, 858, 860, 862, 864, 866, 868, 870, 872, 874, 876, 878, 880, 882, 884, 886, 888, 890, 892, 894, 896, 898, 900, 902, 904, 906, 908, 910, 912, 914, 916, 918, 920, 922, 924, 926, 928, 930, 932, 934, 936, 938, 940, 942, 944, 946, 948, 950, 952, 954, 956, 958, 960, 962, 964, 966, 968, 970, 972, 974, 1760, 1762, 1764, 1766, 1768, 1770, 1772, 1774, 1776, 1778, 1780, 1782, 1784, 1786, 1788, 1790, 1792, 1794, 1796, 1798, 1800, 1802, 1804, 1806, 1808, 1810, 1812, 1814, 1816, 1818, 1820, 1822, 1824, 1826, 1828, 1830, 1832, 1834, 1836, 1838, 1840, 1842, 1844, 1846, 1848, 1850, 1852, 1854, 1856, 1858, 1860, 1862, 1864, 1866, 1868, 1870, 1872 or 1874.

74. The dsRNAi agent of claim 1, wherein the sense strand comprises the nucleotide sequence set forth in any one of SEQ ID NO: 85, 181, 211, 349, 375, 401, 439, 459, 461, 463, 465, 467, 469, 471, 473, 475, 477, 479, 481, 483, 485, 487, 489, 491, 493, 495, 497, 499, 501, 503, 505, 507, 509, 511, 513, 515, 517, 519, 521, 523, 525, 527, 529, 531, 533, 535, 537, 539, 541, 543, 545, 547, 549, 551, 553, 555, 557, 559, 561, 563, 565, 567, 569, 571, 573, 575, 577, 579, 581, 583, 585, 587, 589, 591, 593, 595, 597, 599, 601, 603, 605, 607, 609, 611, 613, 615, 617, 619, 621, 623, 625, 627, 629, 631, 633, 635, 637, 639, 641, 643, 645, 647, 649, 651, 653, 655, 657, 659, 661, 663, 665, 667, 669, 671, 673, 675, 677, 679, 681, 683, 685, 687, 689, 691, 693, 695, 697, 699, 701, 703, 705, 707, 709, 711, 713, 715, 717, 719, 721, 723, 725, 727, 729, 731, 733, 735, 737, 739, 741, 743, 745, 747, 749, 751, 753, 755, 757, 759, 761, 763, 765, 767, 769, 771, 773, 775, 777, 779, 781, 783, 785, 787, 789, 791, 793, 795, 797, 799, 801, 803, 805, 807, 809, 811, 813, 815, 817, 819, 821, 823, 825, 827, 829, 831, 833, 835, 837, 839, 841, 843, 845, 847, 849, 851, 853, 855, 857, 859, 861, 863, 865, 867, 869, 871, 873, 875, 877, 879, 881, 883, 885, 887, 889, 891, 893, 895, 897, 899, 901, 903, 905, 907, 909, 911, 913, 915, 917, 919, 921, 923, 925, 927, 929, 931, 933, 935, 937, 939, 941, 943, 945, 947, 949, 951, 953, 955, 957, 959, 961, 963, 965, 967, 969, 971, 973, 1759, 1761, 1763, 1765, 1767, 1769, 1771, 1773, 1775, 1777, 1779, 1781, 1783, 1785, 1787, 1789, 1791, 1793, 1795, 1797, 1799, 1801, 1803, 1805, 1807, 1809, 1811, 1813, 1815, 1817, 1819, 1821, 1823, 1825, 1827, 1829, 1831, 1833, 1835, 1837, 1839, 1841, 1843, 1845, 1847, 1849, 1851, 1853, 1855, 1857, 1859, 1861, 1863, 1865, 1867, 1869, 1871 or 1873.

75. The dsRNAi agent of claim 1 wherein the dsRNAi agent comprises a sense strand and an antisense strand comprising respectively the nucleotide sequence set forth in any one of the following pairs: SEQ ID NO: 85 and 86; SEQ ID NO: 181 and 182; SEQ ID NO: 211 and 212; SEQ ID NO: 349 and 350; SEQ ID NO: 375 and 376; SEQ ID NO: 401 and 402; SEQ ID NO: 439 and 440; SEQ ID NO:459 and 460; SEQ ID NO:461 and 462; SEQ ID NO:463 and 464; SEQ ID NO:465 and 466; SEQ ID NO:467 and 468; SEQ ID NO:469 and 470; SEQ ID NO:471 and 472; SEQ ID NO:473 and 474; SEQ ID NO:475 and 476; SEQ ID NO:477 and 478; SEQ ID NO:479 and 480; SEQ ID NO:481 and 482; SEQ ID NO:483 and 484; SEQ ID NO:485 and 486; SEQ ID NO:487 and 488; SEQ ID NO:489 and 490; SEQ ID NO:491 and 492; SEQ ID NO:493 and 494; SEQ ID NO:495 and 496; SEQ ID NO:497 and 498; SEQ ID NO:499 and 500; SEQ ID NO: 501 and 502; SEQ ID NO: 503 and 504; SEQ ID NO: 505 and 506; SEQ ID NO: 507 and 508; SEQ ID NO: 509 and 510; SEQ ID NO: 511 and 512; SEQ ID NO: 513 and 514; SEQ ID NO: 515 and 516; SEQ ID NO: 517 and 518; SEQ ID NO: 519 and 520; SEQ ID NO: 521 and 522; SEQ ID NO: 523 and 524; SEQ ID NO: 525 and 526; SEQ ID NO: 527 and 528; SEQ ID NO: 529 and 530; SEQ ID NO: 531 and 532; SEQ ID NO: 533 and 534; SEQ ID NO: 535 and 536; SEQ ID NO: 537 and 538; SEQ ID NO: 539 and 540; SEQ ID NO: 541 and 542; SEQ ID NO: 543 and 544; SEQ ID NO: 545 and 546; SEQ ID NO: 547 and 548; SEQ ID NO: 549 and 550; SEQ ID NO: 551 and 552; SEQ ID NO: 553 and 554; SEQ ID NO: 555 and 556; SEQ ID NO: 557 and 558; SEQ ID NO: 559 and 560; SEQ ID NO: 561 and 562; SEQ ID NO: 563 and 564; SEQ ID NO: 565 and 566; SEQ ID NO: 567 and 568; SEQ ID NO: 569 and 570; SEQ ID NO: 571 and 572; SEQ ID NO: 573 and 574; SEQ ID NO: 575 and 576; SEQ ID NO: 577 and 578; SEQ ID NO: 579 and 580; SEQ ID NO: 581 and 582; SEQ ID NO: 583 and 584; SEQ ID NO: 585 and 586; SEQ ID NO: 587 and 588; SEQ ID NO: 589 and 590; SEQ ID NO: 591 and 592; SEQ ID NO: 593 and 594; SEQ ID NO: 595 and 596; SEQ ID NO: 597 and 598; SEQ ID NO: 599 and 600; SEQ ID NO: 601 and 602; SEQ ID NO: 603 and 604; SEQ ID NO: 605 and 606; SEQ ID NO: 607 and 608; SEQ ID NO: 609 and 610; SEQ ID NO: 611 and 612; SEQ ID NO: 613 and 614; SEQ ID NO: 615 and 616; SEQ ID NO: 617 and 618; SEQ ID NO: 619 and 620; SEQ ID NO: 621 and 622; SEQ ID NO: 623 and 624; SEQ ID NO: 625 and 626; SEQ ID NO: 627 and 628; SEQ ID NO: 629 and 630; SEQ ID NO: 631 and 632; SEQ ID NO: 633 and 634; SEQ ID NO: 635 and 636; SEQ ID NO: 637 and 638; SEQ ID NO: 639 and 640; SEQ ID NO: 641 and 642; SEQ ID NO: 643 and 644; SEQ ID NO: 645 and 646; SEQ ID NO: 647 and 648; SEQ ID NO: 649 and 650; SEQ ID NO: 651 and 652; SEQ ID NO: 653 and 654; SEQ ID NO: 655 and 656; SEQ ID NO: 657 and 658; SEQ ID NO: 659 and 660; SEQ ID NO: 661 and 662; SEQ ID NO: 663 and 664; SEQ ID NO: 665 and 666; SEQ ID NO: 667 and 668; SEQ ID NO: 669 and 670; SEQ ID NO: 671 and 672; SEQ ID NO: 673 and 674; SEQ ID NO: 675 and 676; SEQ ID NO: 677 and 678; SEQ ID NO: 679 and 680; SEQ ID NO: 681 and 682; SEQ ID NO: 683 and 684; SEQ ID NO: 685 and 686; SEQ ID NO: 687 and 688; SEQ ID NO: 689 and 690; SEQ ID NO: 691 and 692; SEQ ID NO: 693 and 694; SEQ ID NO: 695 and 696; SEQ ID NO: 697 and 698; SEQ ID NO: 699 and 700; SEQ ID NO: 701 and 702; SEQ ID NO: 703 and 704; SEQ ID NO: 705 and 706; SEQ ID NO: 707 and 708; SEQ ID NO: 709 and 710; SEQ ID NO: 711 and 712; SEQ ID NO: 713 and 714; SEQ ID NO: 715 and 716; SEQ ID NO: 717 and 718; SEQ ID NO: 719 and 720; SEQ ID NO: 721 and 722; SEQ ID NO: 723 and 724; SEQ ID NO: 725 and 726; SEQ ID NO: 727 and 728; SEQ ID NO: 729 and 730; SEQ ID NO: 731 and 732; SEQ ID NO: 733 and 734; SEQ ID NO: 735 and 736; SEQ ID NO: 737 and 738; SEQ ID NO: 739 and 740; SEQ ID NO: 741 and 742; SEQ ID NO: 743 and 744; SEQ ID NO: 745 and 746; SEQ ID NO: 747 and 748; SEQ ID NO: 749 and 750; SEQ ID NO: 751 and 752; SEQ ID NO: 753 and 754; SEQ ID NO: 755 and 756; SEQ ID NO: 757 and 758; SEQ ID NO: 759 and 760; SEQ ID NO: 761 and 762; SEQ ID NO: 763 and 764; SEQ ID NO: 765 and 766; SEQ ID NO: 767 and 768; SEQ ID NO: 769 and 770; SEQ ID NO: 771 and 772; SEQ ID NO: 773 and 774; SEQ ID NO: 775 and 776; SEQ ID NO: 777 and 778; SEQ ID NO: 779 and 780; SEQ ID NO: 781 and 782; SEQ ID NO: 783 and 784; SEQ ID NO: 785 and 786; SEQ ID NO: 787 and 788; SEQ ID NO: 789 and 790; SEQ ID NO: 791 and 792; SEQ ID NO: 793 and 794; SEQ ID NO: 795 and 796; SEQ ID NO: 797 and 798; SEQ ID NO: 799 and 800; SEQ ID NO: 801 and 802; SEQ ID NO: 803 and 804; SEQ ID NO: 805 and 806; SEQ ID NO: 807 and 808; SEQ ID NO: 809 and 810; SEQ ID NO: 811 and 812; SEQ ID NO: 813 and 814; SEQ ID NO: 815 and 816; SEQ ID NO: 817 and 818; SEQ ID NO: 819 and 820; SEQ ID NO: 821 and 822; SEQ ID NO: 823 and 824; SEQ ID NO: 825 and 826; SEQ ID NO: 827 and 828; SEQ ID NO: 829 and 830; SEQ ID NO: 831 and 832; SEQ ID NO: 833 and 834; SEQ ID NO: 835 and 836; SEQ ID NO: 837 and 838; SEQ ID NO: 839 and 840; SEQ ID NO: 841 and 842; SEQ ID NO: 843 and 844; SEQ ID NO: 845 and 846; SEQ ID NO: 847 and 848; SEQ ID NO: 849 and 850; SEQ ID NO: 851 and 852; SEQ ID NO: 853 and 854; SEQ ID NO: 855 and 856; SEQ ID NO: 857 and 858; SEQ ID NO:859 and 860; SEQ ID NO:861 and 862; SEQ ID NO:863 and 864; SEQ ID NO:865 and 866; SEQ ID NO:867 and 868; SEQ ID NO:869 and 870; SEQ ID NO:871 and 872; SEQ ID NO:873 and 874; SEQ ID NO:875 and 876; SEQ ID NO:877 and 878; SEQ ID NO:879 and 880; SEQ ID NO:881 and 882; SEQ ID NO:883 and 884; SEQ ID NO:885 and 886; SEQ ID NO:887 and 888; SEQ ID NO:889 and 890; SEQ ID NO:891 and 892; SEQ ID NO:893 and 894; SEQ ID NO:895 and 896; SEQ ID NO:897 and 898; SEQ ID NO:899 and 900; SEQ ID NO:901 and 902; SEQ ID NO:903 and 904; SEQ ID NO:905 and 906; SEQ ID NO:907 and 908; SEQ ID NO:909 and 910; SEQ ID NO:911 and 912; SEQ ID NO:913 and 914; SEQ ID NO:915 and 916; SEQ ID NO:917 and 918; SEQ ID NO:919 and 920; SEQ ID NO:921 and 922; SEQ ID NO:923 and 924; SEQ ID NO:925 and 926; SEQ ID NO:927 and 928; SEQ ID NO:929 and 930; SEQ ID NO:931 and 932; SEQ ID NO:933 and 934; SEQ ID NO:935 and 936; SEQ ID NO:937 and 938; SEQ ID NO:939 and 940; SEQ ID NO:941 and 942; SEQ ID NO:943 and 944; SEQ ID NO:945 and 946; SEQ ID NO:947 and 948; SEQ ID NO:949 and 950; SEQ ID NO:951 and 952; SEQ ID NO:953 and 954; ID NO:955 and 956; SEQ ID NO:957 and 958; SEQ ID NO:959 and 960; SEQ ID NO:961 and 962; SEQ ID NO:963 and 964; SEQ ID NO:965 and 966; SEQ ID NO:967 and 968; SEQ ID NO:969 and 970; SEQ ID NO:971 and 972; SEQ ID NO:973 and 974; SEQ ID NO:1759 and 1760; SEQ ID NO:1761 and 1762; SEQ ID NO:1763 and 1764; SEQ ID NO:1765 and 1766; SEQ ID NO:1767 and 1768; SEQ ID NO:1769 and 1770; SEQ ID NO:1771 and 1772; SEQ ID NO:1773 and 1774; SEQ ID NO:1775 and 1776; SEQ ID NO:1777 and 1778; SEQ ID NO:1779 and 1780; SEQ ID NO:1781 and 1782; SEQ ID NO:1783 and 1784; SEQ ID NO:1785 and 1786; SEQ ID NO:1787 and 1788; SEQ ID NO:1789 and 1790; SEQ ID NO:1791 and 1792; SEQ ID NO:1793 and 1794; SEQ ID NO:1795 and 1796; SEQ ID NO:1797 and 1798; SEQ ID NO:1799 and 1800; SEQ ID NO:1801 and 1802; SEQ ID NO:1803 and 1804; SEQ ID NO:1805 and 1806; SEQ ID NO:1807 and 1808; SEQ ID NO:1809 and 1810; SEQ ID NO:1811 and 1812; SEQ ID NO:1813 and 1814; SEQ ID NO:1815 and 1816; SEQ ID NO:1817 and 1818; SEQ ID NO:1819 and 1820; SEQ ID NO:1821 and 1822; SEQ ID NO:1823 and 1824; SEQ ID NO:1825 and 1826; SEQ ID NO:1827 and 1828; SEQ ID NO:1829 and 1830; SEQ ID NO:1831 and 1832; SEQ ID NO:1833 and 1834; SEQ ID NO:1835 and 1836; SEQ ID NO:1837 and 1838; SEQ ID NO:1839 and 1840; SEQ ID NO:1841 and 1842; SEQ ID NO:1843 and 1844; SEQ ID NO:1845 and 1846; SEQ ID NO:1847 and 1848; SEQ ID NO:1849 and 1850; SEQ ID NO:1851 and 1852; SEQ ID NO:1853 and 1854; SEQ ID NO:1855 and 1856; SEQ ID NO:1857 and 1858; SEQ ID NO:1859 and 1860; SEQ ID NO:1861 and 1862; SEQ ID NO:1863 and 1864; SEQ ID NO:1865 and 1866; SEQ ID NO:1867 and 1868; SEQ ID NO:1869 and 1870; SEQ ID NO:1871 and 1872; or, SEQ ID NO:1873 and 1874.

76. The dsRNAi agent of claim 1, wherein the dsRNAi agent further comprises at least one targeting ligand conjugated to the sense strand and/or the antisense strand, optionally wherein the at least one targeting ligand binds specifically to an asialoglycoprotein receptor (ASGPR) on the surface of a liver cell such as a hepatocyte or to a receptor on the surface of a fat cell such as an adipocyte.

77.-86. (canceled)

87. The dsRNAi agent of claim 76, wherein the dsRNAi agent has the structure shown in any one of the following Formulae 1 to 33, or is a pharmaceutically acceptable salt thereof:

[chemical structure]

[chemical structure]

[chemical structure]

[chemical structure]

[chemical structure]

[chemical structure]

[chemical structure]

[chemical structure]

[chemical structure]

[chemical structure]

88.-90. (canceled)

91. A pharmaceutical composition comprising the dsRNAi agent of claim 1 or a pharmaceutically acceptable salt thereof, and a pharmaceutically acceptable carrier, excipient or diluent.

92.-101. (canceled)

102. A method of inhibiting the expression of inhibin subunit beta E (INHBE) in a cell, the method comprising contacting the cell with the dsRNAi agent of claim 1, such that INHBE expression in the cell is inhibited.

103.-106. (canceled)

107. A method for prevention and/or treatment of an INHBE-associated disease or disorder in a subject, the method comprising administering to the subject a therapeutically effective amount of the dsRNAi agent of claim 1, such that the INHBE-associated disease or disorder is prevented or treated.

108. The method of claim 107, wherein the subject suffers from, is at risk for, or displays at least one symptom of, an INHBE-associated disease or disorder selected from a metabolic disorder, metabolic syndrome, type 2 diabetes, obesity, pre-diabetes, elevated triglyceride levels, lipodystrophy, liver inflammation, fatty liver, hypercholesterolemia, disorders associated with elevated liver enzymes, nonalcoholic steatohepatitis, cardiovascular disease, kidney disease, a cardiometabolic disorder, abdominal obesity, insulin resistance, hypertension, hyperlipidemia, and a cancer associated with INHBE expression.

109.-126. (canceled)

127. The method of claim 107, wherein INHBE expression is inhibited by at least about 30%, at least about 35%, at least about 40%, at least about 45%, at least about 50%, at least about 55%, at least about 60%, at least about 65%, at least about 70%, at least about 75%, at least about 80%, at least about 85%, at least about 90% or at least about 95% in the cell or in the subject.

128.-145. (canceled)
